(19) United States
(12) Patent Application Publication
(10) Pub. No.: US 2007/0261129 A1
(43) Pub. Date: Nov. 8, 2007

(54) Nucleic acid molecules and other molecules associated with plants

(76) Inventors: Scott E. Andersen, St. Louis, MO (US); James D. Masucci, Ballwin, MO (US)

Correspondence Address: ARNOLD & PORTER, LLP, 555 TWELFTH STREET, N.W., ATTN: IP DOCKETING, WASHINGTON, DC, 20004, US

(21) Appl. No.: 11/239,625

(22) Filed: Sep. 30, 2005

Related U.S. Application Data
(63) Continuation of application No. 09/540,232, filed on Apr. 3, 2000, now abandoned.

(51) Int. Cl. A01H 5/00; C07H 21/04; C12N 15/82; C07K 14/415

(52) U.S. Cl. 800/278; 800/320.1; 800/312; 800/315; 800/320.3; 536/23.6; 530/370; 435/419; 435/468; 435/412; 435/415

(57) ABSTRACT

Expressed Sequence Tags (ESTs) isolated from lily are disclosed. The ESTs provide a unique molecular tool for the targeting and isolation of novel genes for plant protection and improvement. The disclosed ESTs have utility in the development of new strategies for understanding critical plant developmental and metabolic pathways. The disclosed ESTs have particular utility in isolating genes and promoters, identifying and mapping the genes involved in developmental and metabolic pathways, and determining gene function. Sequence homology analyses using the ESTs provided in the present invention, will result in more efficient gene screening for desirable agronomic traits. An expanding database of these select pieces of the plant genomics puzzle will quickly expand the knowledge necessary for subsequent functional validation, a key limitation in current plant biotechnology efforts.

### FIELD OF THE INVENTION

[0001] The present invention is in the field of plant biochemistry. More specifically the invention relates to nucleic acid molecules that encode proteins and fragments of proteins produced in plant cells, in particular, lily plants. The invention also relates to proteins and fragments of proteins so encoded and antibodies capable of binding the proteins. The invention also relates to methods of using the nucleic acid molecules, proteins and fragments of proteins.

### BACKGROUND OF THE INVENTION

I. Expressed Sequence Tag Nucleic Acid Molecules

[0002] Expressed sequence tags, or ESTs, are short sequences of randomly selected clones from a cDNA (or complementary DNA) library which are representative of the cDNA inserts of these randomly selected clones. McCombie, et al., Nature Genetics, 1:124-130 (1992); Kurata, et al., Nature Genetics, 8: 365-372 (1994); Okubo, et al., Nature Genetics, 2: 173-179 (1992), all of which references are incorporated herein in their entirety.

[0003] Using conventional methodologies, cDNA libraries can be constructed from the mRNA (messenger RNA) of a given tissue or organism using poly dT primers and reverse transcriptase (Efstratiadis, et al., Cell 7:279-288 (1976); Higuchi, et al., Proc. Natl. Acad. Sci. (U.S.A.) 73:3146-3150 (1976); Maniatis, et al., Cell 8:163 (1976); Land, et al., Nucleic Acids Res. 9:2251-2266 (1981); Okayama, et al., Mol. Cell. Biol. 2:161-170 (1982); Gubler, et al., Gene 25:263 (1983); all of which are herein incorporated by reference in their entirety).

[0004] Several methods may be employed to obtain full-length cDNA constructs. For example, terminal transferase can be used to add homopolymeric tails of dC residues to the free 3′ hydroxyl groups (Land, et al., Nucleic Acids Res. 9:2251-2266 (1981), herein incorporated by reference in its entirety). This tail can then be hybridized by a poly dG oligo which can act as a primer for the synthesis of full length second strand cDNA. Okayama and Berg, report a method for obtaining full length cDNA constructs. This method has been simplified by using synthetic primer-adapters that have both homopolymeric tails for priming the synthesis of the first and second strands and restriction sites for cloning into plasmids (Coleclough, et al., Gene 34:305-314 (1985), herein incorporated by reference in its entirety) and bacteriophage vectors (Krawinkel, et al., Nucleic Acids Res. 14:1913 (1986); and Han, et al., Nucleic Acids Res. 15:6304 (1987); both of which are herein incorporated by reference in their entirety).

[0005] These strategies have been coupled with additional strategies for isolating rare mRNA populations. For example, a typical mammalian cell contains between 10,000 and 30,000 different mRNA sequences. Davidson, Gene Activity in Early Development, 2nd ed., Academic Press, New York (1976). The number of clones required to achieve a given probability that a low-abundance mRNA will be present in a cDNA library is N=(In(1−P))/(In(1−1/n)) where N is the number of clones required, P is the probability desired, and 1/n is the fractional proportion of the total mRNA that is represented by a single rare mRNA. (Sambrook, et al., Molecular Cloning: A Laboratory Manual, 2nd ed., Cold Spring Harbor Laboratory Press (1989), herein incorporated by reference in its entirety).

[0006] A method to enrich preparations of mRNA for sequences of interest is to fractionate by size. One such method is to fractionate by electrophoresis through an agarose gel (Pennica, et al., Nature 301:214-221 (1983), herein incorporated by reference in its entirety). Another such method employs sucrose gradient centrifugation in the presence of an agent, such as methylmercuric hydroxide, that denatures secondary structure in RNA (Schweinfest, et al, Proc. Natl. Acad. Sci. (U.S.A.) 79:4997-5000 (1982), herein incorporated by reference in its entirety).

[0007] A frequently adopted method is to construct equalized or normalized cDNA libraries (Ko, Nucleic Acids Res. 18:5705-5711 (1990); Patanjali, S. R. et al., Proc. Natl. Acad Sci. (U.S.A.) 88:1943-1947 (1991); both of which are herein incorporated by reference in their entirety). Typically, the cDNA population is normalized by subtractive hybridization (Schmid, et al., J. Neurochem. 48:307-312 (1987); Fargnoli, et al., Anal. Biochem 187:364-373 (1990); Travis, et al., Proc. Natl. Acad Sci (U.S.A.) 85:1696-1700 (1988); Kato, Eur. J. Neurosci. 2:704 (1990); and Schweinfest, et al., Genet. Anal. Tech. Appl. 7:64 (1990); all of which are herein incorporated by reference in their entirety). Subtraction represents another method for reducing the population of certain sequences in the cDNA library (Swaroop, et al., Nucleic Acids Res. 19:1954 (1991), herein incorporated by reference in its entirety).

[0008] ESTs can be sequenced by a number of methods. Two basic methods may be used for DNA sequencing, the chain termination method of Sanger et al., Proc. Natl. Acad Sci. (U.S.A.) 74: 5463-5467 (1977), the entirety of which is herein incorporated by reference and the chemical degradation method of Maxam and Gilbert, Proc. Nat. Acad. Sci. (U.S.A.) 74: 560-564 (1977), the entirety of which is herein incorporated by reference. Automation and advances in technology such as the replacement of radioisotopes with fluorescence-based sequencing have reduced the effort required to sequence DNA (Craxton, Methods, 2: 20-26 (1991); Ju et al., Proc. Natl. Acad. Sci. (U.S.A.) 92: 4347-4351 (1995); Tabor and Richardson, Proc. Natl. Acad. Sci. (U.S.A.) 92: 6339-6343 (1995); all of which are herein incorporated by reference in their entirety). Automated sequencers are available from, for example, Pharmacia Biotech, Inc., Piscataway, N.J. (Pharmacia ALF), LI-COR, Inc., Lincoln, Nebr. (LI-COR 4,000) and Millipore, Bedford, Mass. (Millipore BaseStation).

[0009] In addition, advances in capillary gel electrophoresis have also reduced the effort required to sequence DNA and such advances provide a rapid high resolution approach for sequencing DNA samples (Swerdlow and Gesteland, Nucleic Acids Res. 18:1415-1419 (1990); Smith, Nature 349:812-813 (1991); Luckey et al., Methods Enzymol. 218:154-172 (1993); Lu et al., J. Chromatog. A. 680:497-501 (1994); Carson et al., Anal. Chem. 65:3219-3226 (1993); Huang et al., Anal. Chem. 64:2149-2154 (1992); Kheterpal et al, Electrophoresis 17:1852-1859 (1996); Quesada and Zhang, Electrophoresis 17:1841-1851 (1996); Baba, Yakugaku Zasshi 117:265-281 (1997), all of which are herein incorporated by reference in their entirety).

[0010] ESTs longer than 150 bases have been found to be useful for similarity searches and mapping. (Adams, et al., Science 252:1651-1656 (1991), herein incorporated by reference.) EST sequences normally range from 150-450 bases. This is the length of sequence information that is routinely and reliably generated using single run sequence data. Typically, only single run sequence data is obtained from the cDNA library, Adams, et al., Science 252:1651-1656 (1991). Automated single run sequencing typically results in an approximately 2-3% error or base ambiguity rate. (Boguski, et al., Nature Genetics, 4:332-333 (1993), herein incorporated by reference in its entirety).

[0011] EST databases have been constructed or partially constructed from, for example, C. elegans (McCombrie, et al., Nature Genetics 1:124-131 (1992)), human liver cell line HepG2 (Okubo, et al., Nature Genetics 2:173-179 (1992)), human brain RNA (Adams, et al., Science 252:1651-1656 (1991); Adams, et al., Nature 355:632-635 (1992)), Arabidopsis, (Newman, et al., Plant Physiol. 106:1241-1255 (1994)); and rice (Kurata, et al., Nature Genetics 8:365-372 (1994).

II. Sequence Comparisons

[0012] A characteristic feature of a protein or DNA sequence is that it can be compared with other known protein or DNA sequences. Sequence comparisons can be undertaken by determining the similarity of the test or query sequence with sequences in publicly available or propriety databases (“similarity analysis”) or by searching for certain motifs (“intrinsic sequence analysis”)(e.g. cis elements)(Coulson, Trends in Biotechnology, 12: 76-80 (1994); Birren, et al., Genome Analysis, 1: 543-559 (1997); both of which are herein incorporated by reference in their entirety).

[0013] Similarity analysis includes database search and alignment. Examples of public databases include the DNA Database of Japan (DDBJ)(http://www.ddbj.nig.acjp/); Genebank http://www.ncbi.nlm.nih.gov/web/Genbank/Index.htlm); and the European Molecular Biology Laboratory Nucleic Acid Sequence Database (EMBL) (http://www.ebi.ac.uk/ebi_docs/embl_db.html). A number of different search algorithms have been developed, one example of which are the suite of programs referred to as BLAST programs. There are five implementations of BLAST, three designed for nucleotide sequences queries (BLASTN, BLASTX, and TBLASTX) and two designed for protein sequence queries (BLASTP and TBLASTN) (Coulson, Trends in Biotechnology, 12: 76-80 (1994); Birren, et al., Genome Analysis, 1: 543-559 (1997)).

[0014] BLASTN takes a nucleotide sequence (the query sequence) and its reverse complement and searches them against a nucleotide sequence database. BLASTN was designed for speed, not maximum sensitivity, and may not find distantly related coding sequences. BLASTX takes a nucleotide sequence, translates it in three forward reading frames and three reverse complement reading frames, and then compares the six translations against a protein sequence database. BLASTX is useful for sensitive analysis of preliminary (single-pass) sequence data and is tolerant of sequencing errors (Gish and States, Nature Genetics, 3: 266-272 (1993), herein incorporated by reference). BLASTN and BLASTX may be used in concert for analyzing EST data (Coulson, Trends in Biotechnology, 12: 76-80 (1994); Birren, et al., Genome Analysis, 1: 543-559 (1997)).

[0015] Given a coding nucleotide sequence and the protein it encodes, it is often preferable to use the protein as the query sequence to search a database because of the greatly increased sensitivity to detect more subtle relationships. This is due to the larger alphabet of proteins (20 amino acids) compared with the alphabet of nucleic acid sequences (4 bases), where it is far easier to obtain a match by chance. In addition, with nucleotide alignments, only a match (positive score) or a mismatch (negative score) is obtained, but with proteins, the presence of conservative amino acid substitutions can be taken into account. Here, a mismatch may yield a positive score if the non-identical residue has physical/chemical properties similar to the one it replaced. Various scoring matrices are used to supply the substitution scores of all possible amino acid pairs. A general purpose scoring system is the BLOSUM62 matrix (Henikoff and Henikoff, Proteins, 17: 49-61 (1993), herein incorporated by reference in its entirety), which is currently the default choice for BLAST programs. BLOSUM62 is tailored for alignments of moderately diverged sequences and thus may not yield the best results under all conditions. Altschul, J. Mol. Biol. 36: 290-300 (1993), herein incorporated by reference in its entirety, uses a combination of three matrices to cover all contingencies. This may improve sensitivity, but at the expense of slower searches. In practice, a single BLOSUM62 matrix is often used but others (PAM40 and PAM250) may be attempted when additional analysis is necessary. Low PAM matrices are directed at detecting very strong but localized sequence similarities, whereas high PAM matrices are directed at detecting long but weak alignments between very distantly related sequences.

[0016] Homologues in other organisms are available that can be used for comparative sequence analysis. Multiple alignments are performed to study similarities and differences in a group of related sequences. CLUSTAL W is a multiple sequence alignment package available that performs progressive multiple sequence alignments based on the method of Feng and Doolittle, J. Mol. Evol. 25: 351-360 (1987), the entirety of which is herein incorporated by reference. Each pair of sequences is aligned and the distance between each pair is calculated; from this distance matrix, a guide tree is calculated, and all of the sequences are progressively aligned based on this tree. A feature of the program is its sensitivity to the effect of gaps on the alignment; gap penalties are varied to encourage the insertion of gaps in probable loop regions instead of in the middle of structured regions. Users can specify gap penalties, choose between a number of scoring matrices, or supply their own scoring matrix for both the pairwise alignments and the multiple alignments. CLUSTAL W for UNIX and VMS systems is available at: ftp.ebi.ac.uk. Another program is MACAW (Schuler et al., Proteins, Struct. Func. Genet, 9:180-190 (1991), the entirety of which is herein incorporated by reference, for which both Macintosh and Microsoft Windows versions are available. MACAW uses a graphical interface, provides a choice of several alignment algorithms, and is available by anonymous ftp at: ncbi.nlm.nih.gov (directory/pub/macaw).

[0017] Sequence motifs are derived from multiple alignments and can be used to examine individual sequences or an entire database for subtle patterns. With motifs, it is sometimes possible to detect distant relationships that may not be demonstrable based on comparisons of primary sequences alone. Currently, the largest collection of sequence motifs in the world is PROSITE (Bairoch and Bucher, Nucleic Acid Research, 22: 3583-3589 (1994), the entirety of which is herein incorporated by reference.) PROSITE may be accessed via either the ExPASy server on the World Wide Web or anonymous ftp site. Many commercial sequence analysis packages also provide search programs that use PROSITE data.

[0018] A resource for searching protein motifs is the BLOCKS E-mail server developed by S. Henikoff, Trends Biochem Sci., 18:267-268 (1993); Henikoff and Henikoff, Nucleic Acid Research, 19:6565-6572 (1991); Henikoff and Henikoff, Proteins, 17: 49-61 (1993); all of which are herein incorporated by reference in their entirety). BLOCKS searches a protein or nucleotide sequence against a database of protein motifs or “blocks.” Blocks are defined as short, ungapped multiple alignments that represent highly conserved protein patterns. The blocks themselves are derived from entries in PROSITE as well as other sources. Either a protein or nucleotide query can be submitted to the BLOCKS server; if a nucleotide sequence is submitted, the sequence is translated in all six reading frames and motifs are sought in these conceptual translations. Once the search is completed, the server will return a ranked list of significant matches, along with an alignment of the query sequence to the matched BLOCKS entries.

[0019] Conserved protein domains can be represented by two-dimensional matrices, which measure either the frequency or probability of the occurrences of each amino acid residue and deletions or insertions in each position of the domain. This type of model, when used to search against protein databases, is sensitive and usually yields more accurate results than simple motif searches. Two popular implementations of this approach are profile searches (such as GCG program ProfileSearch) and Hidden Markov Models (HMMs)(Krough et al., J. Mol. Biol. 235:1501-1531 (1994); Eddy, Current Opinion in Structural Biology 6:361-365 (1996), both of which are herein incorporated by reference in their entirety). In both cases, a large number of common protein domains have been converted into profiles, as present in the PROSITE library, or HHM models, as in the Pfam protein domain library (Sonnhammer et al., Proteins 28:405-420 (1997), the entirety of which is herein incorporated by reference). Pfam contains more than 500 HMM models for enzymes, transcription factors, signal transduction molecules, and structural proteins. Protein databases can be queried with these profiles or HMM models, which will identify proteins containing the domain of interest. For example, HMMSW or HMMFS, two programs in a public domain package called HMMER (Sonnhammer et al., Proteins 28:405-420 (1997)) can be used.

[0020] PROSITE and BLOCKS represent collected families of protein motifs. Thus, searching these databases entails submitting a single sequence to determine whether or not that sequence is similar to the members of an established family. Programs working in the opposite direction compare a collection of sequences with individual entries in the protein databases. An example of such a program is the Motif Search Tool, or MoST (Tatusov et al. Proc. Natl. Acad. Sci. 91: 12091-12095 (1994), the entirety of which is herein incorporated by reference.) On the basis of an aligned set of input sequences, a weight matrix is calculated by using one of four methods (selected by the user); a weight matrix is simply a representation, position by position in an alignment, of how likely a particular amino acid will appear. The calculated weight matrix is then used to search the databases. To increase sensitivity, newly found sequences are added to the original data set, the weight matrix is recalculated, and the search is performed again. This procedure continues until no new sequences are found.

### SUMMARY OF THE INVENTION

[0021] The present invention provides a substantially purified nucleic acid molecule that encodes a lily protein or fragment thereof comprising a nucleic acid sequence selected from the group consisting of SEQ ID NO: 1 through SEQ ID NO: 6167.

[0022] The present invention also provides one or more substantially purified nucleic acid molecules comprising a nucleic acid sequence selected from the group consisting of SEQ ID NO: 1 through SEQ ID NO:6167 or complements thereof.

[0023] The present invention also provides a substantially purified My protein or fragment thereof, wherein said lily protein is encoded by a nucleic acid molecule that comprises a nucleic acid sequence selected from the group consisting of SEQ ID NO: 1 through SEQ ID NO: 6167.

[0024] The present invention further provides a substantially purified protein, peptide, or fragment thereof encoded by a nucleic acid sequence which specifically hybridizes to a nucleic acid molecule comprising a nucleic acid sequence selected from the group consisting of a complement of SEQ ID NO: 1 through SEQ ID NO:6167.

[0025] The present invention further provides a substantially purified antibody capable of specifically binding to a protein or fragment thereof encoded by a nucleic acid sequence which specifically hybridizes to a nucleic acid molecule having a nucleic acid sequence selected from the group consisting of a complement of SEQ ID NO: 1 through SEQ ID NO:6167.

[0026] The present invention also provides a transformed plant transformed to contain a nucleic acid molecule which comprises: (A) an exogeneous promoter region which functions in plant cells to cause the production of an mRNA molecule; which is linked to (B) a structural nucleic acid molecule, wherein said structural nucleic acid molecule comprises a nucleic acid molecule that encodes a protein, peptide, or fragment thereof which hybridizes to a nucleic acid sequence selected from the group consisting of a complement of SEQ ID NO:1 through SEQ ID NO:6167 expressed in an effective amount to produce a desirable agronomic effect; which is linked to (C) a 3′ non-translated sequence that functions in plant cells to cause the termination of transcription and the addition of polyadenylated ribonucleotides to the 3′ end of the mRNA sequence.

[0027] The present invention also provides a transformed plant cell containing a nucleic acid molecule whose non-transcribed strand encodes a protein or fragment thereof, wherein the transcribed strand of said nucleic acid is complementary to a nucleic acid molecule that encodes a protein or fragment thereof. The present invention also provides bacterial, viral, microbial, and plant cells comprising a nucleic acid molecule of the present invention

[0028] The present invention also provides a method of producing a plant containing one or more proteins encoded by sequences comprising SEQ ID NO: 1 or complement thereof through SEQ ID NO:6167 or complements thereof, expressed in a sufficient amount and/or fashion to produce a desirable agronomic effect.

[0029] In accomplishing the foregoing, there is provided, in accordance with one aspect of the present invention, methods of producing genetically transformed plants, comprising the steps of:
[0030] (a) inserting into the genome of a plant cell a recombinant, double-stranded DNA molecule comprising
   [0031] (i) a promoter which functions in plant cells to cause the production of an RNA sequence,
   [0032] (ii) a structural DNA sequence that causes the production of an RNA sequence which encodes a desired protein.
   [0033] (iii) a 3′ non-translated DNA sequence which functions in plant cells to cause the addition of polyadenylated nucleotides to the 3′ end of RNA sequence; where the promoter is homologous or heterologous with respect to the coding sequence and adapted to cause sufficient expression of a protein in desired plant tissues to enhance the agronomic utility of a plant transformed with said gene.
[0034] (b) obtaining a transformed plant cell with said nucleic acid molecule that encodes one or more proteins, wherein said nucleic acid molecule is transcribed and results in expression of said protein(s); and
[0035] (c) regenerating from the transformed plant cell a genetically transformed plant

[0036] The present invention also encompasses differentiated plants, seeds, and progeny comprising said transformed plant cells and which exhibit novel properties of agronomic significance.

[0037] The present invention also provides a method of producing a plant containing reduced levels of a protein comprising: (A) transforming a plant cell with a nucleic acid molecule that encodes a protein, wherein said nucleic acid molecule is transcribed and results in co-suppression of endogenous protein synthesis activity, and (B) regenerating plants and producing subsequent progeny from the transformed plant.

[0038] The present invention also provides a method of determining an association between a polymorphism and a plant trait comprising: (A) hybridizing a nucleic acid molecule specific for a polymorphism to genetic material of a plant, wherein said nucleic acid molecule comprising a nucleic acid sequence selected from the group consisting of SEQ ID NO: 1 through SEQ ID NO:6167 or complements thereof; and (B) calculating the degree of association between the polymorphism and the plant trait.

[0039] The present invention also provides a method of isolating a genetic region, or nucleic acid that encodes a protein or fragment thereof comprising: (A) incubating under conditions permitting nucleic acid hybridization: a marker nucleic acid molecule, preferably an EST, with a complementary nucleic acid molecule obtained from a plant cell or plant tissue; (B) permitting hybridization between said marker nucleic acid molecule, preferably an EST, and said complementary nucleic acid molecule obtained from said plant cell or plant tissue; and (C) isolating said complementary nucleic acid molecule.

[0040] The present invention also provides a method for determining a level or pattern in a plant cell of a protein in a plant comprising: (A) incubating, under conditions permitting nucleic acid hybridization, a marker nucleic acid molecule, the marker nucleic acid molecule selected from the group of marker nucleic acid molecules which specifically hybridize to a nucleic acid molecule having the nucleic acid sequence selected from the group consisting of SEQ ID NO: 1 through SEQ ID NO: 6167 or complements thereof or fragments of either, with a complementary nucleic acid molecule obtained from the plant cell or plant tissue, wherein nucleic acid hybridization between the marker nucleic acid molecule and the complementary nucleic acid molecule obtained from the plant cell or plant tissue permits the detection of an mRNA for the enzyme; (B) permitting hybridization between the marker nucleic acid molecule and the complementary nucleic acid molecule obtained from the plant cell or plant tissue; and (C) detecting the level or pattern of the complementary nucleic acid, wherein the detection of the complementary nucleic acid is predictive of the level or pattern of the protein.

[0041] The present invention also provides a method for determining the level or pattern of a protein in a plant cell or plant tissue comprising: (A) incubating under conditions permitting nucleic acid hybridization: a marker nucleic acid molecule, the marker nucleic acid molecule comprising a nucleotide sequence selected from the group consisting of SEQ ID NO: 1 through SEQ ID NO:6167 or complements thereof, with a complementary nucleic acid molecule obtained from a plant cell or plant tissue, wherein nucleic acid hybridization between the marker nucleic acid molecule, and the complementary nucleic acid molecule obtained from the plant cell or plant tissue permits the detection of said protein; (B) permitting hybridization between the marker nucleic acid molecule and the complementary nucleic acid molecule obtained from the plant cell or plant tissue; and (C) detecting the level or pattern of the complementary nucleic acid, wherein the detection of said complementary nucleic acid is predictive of the level or pattern of the protein synthesis.

[0042] The present invention also provides a method for determining a level or pattern of a protein in a plant cell or plant tissue which comprises assaying the concentration of a molecule, whose concentration is dependent upon the expression of a gene, the gene having a nucleic acid sequence which specifically hybridizes to a protein marker nucleic acid molecule, the molecule being present in a plant cell or plant tissue, in comparison to the concentration of that molecule present in a plant cell or plant tissue with a known level or pattern of said protein, wherein an assayed concentration of the molecule is compared to the assayed concentration of the molecule in a plant cell or plant tissue with a known level or pattern of said protein.

[0043] The present invention also provides a method of determining a mutation in a plant whose presence is predictive of a mutation affecting a level or pattern of a protein comprising the steps: (A) incubating, under conditions permitting nucleic acid hybridization, a marker nucleic acid, the marker nucleic acid selected from the group of marker nucleic acid molecules which specifically hybridize to a nucleic acid molecule consisting of the nucleic acid sequence selected from the group consisting of SEQ ID NO: 1 through SEQ ID NO: 6167 or complements thereof or fragments of either and a complementary-nucleic acid molecule obtained from the plant, wherein nucleic acid hybridization between the marker nucleic acid molecule and the complementary nucleic acid molecule obtained from the plant permits the detection of a polymorphism whose presence is predictive of a mutation affecting the level or pattern of the protein in the plant; (B) permitting hybridization between the marker nucleic acid molecule and the complementary nucleic acid molecule obtained from the plant; and (C) detecting the presence of the polymorphism, wherein the detection of the polymorphism is predictive of the mutation.

[0044] The present invention also provides a method for determining a mutation in a plant whose presence is predictive of a mutation affecting the level or pattern of protein synthesis comprising the steps: (A) incubating under conditions permitting nucleic acid hybridization: a marker nucleic acid molecule, the marker nucleic acid molecule comprising a nucleic acid molecule that is linked to gene, the gene having a nucleic acid sequence which specifically hybridizes to a sequence selected from the group consisting of SEQ ID NO: 1 through SEQ ID NO:6167 and complements thereof, and a complementary nucleic acid molecule obtained from a plant tissue or plant cell of the plant, wherein nucleic acid hybridization between the marker nucleic acid molecule and the complementary nucleic acid molecule obtained from the plant permits the detection of a polymorphism whose presence is predictive of a mutation affecting said level or pattern of a protein synthesis in the plant; (B) permitting hybridization between said marker nucleic acid molecule and said complementary nucleic acid molecule obtained from said plant; and; (C) detecting the presence of the polymorphism, wherein the detection of the polymorphism is predictive of the mutation.

[0045] The present invention also provides a method for reducing expression of a protein in a plant cell, the method comprising: growing a transformed plant cell containing a nucleic acid molecule whose non-transcribed strand encodes a protein or fragment thereof, wherein the transcribed strand of said nucleic acid is complementary to a nucleic acid molecule that encodes the protein in said plant cell, and whereby the strand that is complementary to the nucleic acid molecule that encodes the protein reduces or depresses expression of the protein.

[0046] The present invention provides lily nucleic acid molecules for use as molecular tags to isolate genetic regions (i.e. promoters and flanking sequences), isolate genes, map genes, and determine gene function. The present invention further provides lily nucleic acid molecules for use in determining if genes are members of a particular gene family.

[0047] The present invention also provides a method of obtaining full length genes using lily ESTs or complements thereof or fragments of either.

[0048] The present invention also provides a method of isolating promoters and flanking sequences using lily ESTs or complements thereof or fragments of either.

[0049] The present invention also provides lily ESTs or complements thereof or fragments of either for use in marker-assisted breeding programs.

[0050] The present invention also provides a method of identifying tissues comprising hybridizing nucleic acids from the tissue with lily ESTs or complements thereof or fragments of either.

[0051] The present invention also provides a method for production of antibodies targeted against the proteins, peptides, or fragments produced by the disclosed or complements thereof or fragments of either.

[0052] The present invention also provides a method for the transformation and regeneration of plants comprising sequences hybridizable to the disclosed ESTs or complements thereof or fragments of either.

[0053] The present invention also provides a method of modifying plant protein expression by inserting in a chimeric gene sense or antisense constructs of the lily ESTs.

### DETAILED DESCRIPTION OF THE INVENTION

Agents

[0054] (a) Nucleic Acid Molecules

[0055] Agents of the present invention include nucleic acid molecules and more specifically EST nucleic acid molecules or nucleic acid fragment molecules thereof. Fragment EST nucleic acid molecules may encode significant portion(s) of, or indeed most of, the EST nucleic acid molecule. Alternatively, the fragments may comprise smaller oligonucleotides (having from about 15 to about 250 nucleotide residues, and more preferably, about 15 to about 30 nucleotide residues).

[0056] A subset of the nucleic acid molecules of the present invention includes nucleic acid molecules that are marker molecules. Another subset of the nucleic acid molecules of the present invention include nucleic acid molecules that encode a protein or fragment thereof. Another subset of the nucleic acid molecules of the present invention are EST molecules.

[0057] The term “substantially purified”, as used herein, refers to a molecule separated from substantially all other molecules normally associated with it in its native state. More preferably a substantially purified molecule is the predominant species present in a preparation. A substantially purified molecule may be greater than 60% free, preferably 75% free, more preferably 90% free, and most preferably 95% free from the other molecules (exclusive of solvent) present in the natural mixture. The term “substantially purified” is not intended to encompass molecules present in their native state.

[0058] The agents of the present invention will preferably be “biologically active” with respect to either a structural attribute, such as the capacity of a nucleic acid to hybridize to another nucleic acid molecule, or the ability of a protein to be bound by antibody (or to compete with another molecule for such binding). Alternatively, such an attribute may be catalytic, and thus involve the capacity of the agent to mediate a chemical reaction or response.

[0059] The agents of the present invention may also be recombinant. As used herein, the term recombinant means any agent (e.g. DNA, peptide etc.), that is, or results, however indirect, from human manipulation of a nucleic acid molecule.

[0060] It is understood that the agents of the present invention may be labeled with reagents that facilitate detection of the agent (e.g. fluorescent labels (Prober, et al., Science 238:336-340 (1987); Albarella et al., EP 144914, chemical labels (Sheldon et al., U.S. Pat. No. 4,582,789; Albarella et al., U.S. Pat. No. 4,563,417, modified bases (Miyoshi et al., EP 119448, all of which are hereby incorporated by reference in their entirety).

[0061] It is further understood, that the present invention provides bacterial, viral, microbial, and plant cells comprising the agents of the present invention.

[0062] Nucleic acid molecules or fragment thereof of the present invention are capable of specifically hybridizing to other nucleic acid molecules under certain circumstances. As used herein, two nucleic acid molecules are said to be capable of specifically hybridizing to one another if the two molecules are capable of forming an anti-parallel, double-stranded nucleic acid structure. A nucleic acid molecule is said to be the “complement” of another nucleic acid molecule if they exhibit complete complementarity. As used herein, molecules are said to exhibit “complete complementarity” when every nucleotide of one of the molecules is complementary to a nucleotide of the other. Two molecules are said to be “minimally complementary” if they can hybridize to one another with sufficient stability to permit them to remain annealed to one another under at least conventional “low-stringency” conditions. Similarly, the molecules are said to be “complementary” if they can hybridize to one another with sufficient stability to permit them to remain annealed to one another under conventional “high-stringency” conditions. Conventional stringency conditions are described by Sambrook, et al., In: Molecular Cloning, A Laboratory Manual, 2nd Edition, Cold Spring Harbor Press, Cold Spring Harbor, N.Y. (1989), and by Haymes, et. al. In: Nucleic Acid Hybridization, A Practical Approach, IRL Press, Washington, D.C. (1985), the entirety of which is herein incorporated by reference. Departures from complete complementarity are therefore permissible, as long as such departures do not completely preclude the capacity of the molecules to form a double-stranded structure. Thus, in order for an nucleic acid molecule or fragment of the present invention to serve as a primer or probe it need only be sufficiently complementary in sequence to be able to form a stable double-stranded structure under the particular solvent and salt concentrations employed.

[0063] Appropriate stringency conditions which promote DNA hybridization are, for example, 6.0× sodium chloride/sodium citrate (SSC) at about 45° C., followed by a wash of 2.0×SSC at 50° C., are known to those skilled in the art or can be found in Current Protocols in Molecular Biology, John Wiley & Sons, N.Y. (1989), 6.3.1-6.3.6. For example, the salt concentration in the wash step can be selected from a low stringency of about 2.0×SSC at 50° C. to a high stringency of about 0.2×SSC at 50° C. In addition, the temperature in the wash step can be increased from low stringency conditions at room temperature, about 22° C., to high stringency conditions at about 65° C. Both temperature and salt may be varied, or either the temperature or the salt concentration may be held constant while the other variable is changed.

[0064] In a preferred embodiment, a nucleic acid of the present invention will specifically hybridize to one or more of the nucleic acid molecules set forth in SEQ ID NO: 1 through SEQ ID NO: 6167 or complements thereof under moderately stringent conditions, for example, at about 2.0×SSC and about 65° C.

[0065] In a particularly preferred embodiment, a nucleic acid of the present invention will include those nucleic acid molecules that specifically hybridize to one or more of the nucleic acid molecules set forth in SEQ ID NO:1 through SEQ ID NO: 6167 or complements thereof under high stringency conditions.

[0066] In one aspect of the present invention, the nucleic acid molecules of the present invention have one or more of the nucleic acid sequences set forth in SEQ ID NO: 1 through SEQ ID NO:6167 or complements thereof. In another aspect of the present invention, one or more of the nucleic acid molecules of the present invention share between 100% and 90% sequence identity with one or more of the nucleic acid sequences set forth in SEQ ID NO: 1 through SEQ ID NO:6167 or complements thereof. In a further aspect of the present invention, one or more of the nucleic acid molecules of the present invention share between 100% and 95% sequence identity with one or more of the nucleic acid sequences set forth in SEQ ID NO: 1 through SEQ ID NO:6167 or complements thereof. In a more preferred aspect of the present invention, one or more of the nucleic acid molecules of the present invention share between 100% and 98% sequence identity with one or more of the nucleic acid sequences set forth in SEQ ID NO: 1 through SEQ ID NO:6167 or complements thereof. In an even more preferred aspect of the present invention, one or more of the nucleic acid molecules of the present invention share between 100% and 99% sequence identity with one or more of the sequences set forth in SEQ ID NO: 1 through SEQ ID NO:6167 or complements thereof. In a further, even more preferred aspect of the present invention, one or more of the nucleic acid molecules of the present invention exhibit 100% sequence identity with one or more nucleic acid molecules present within the cDNA libraries designated LIB3102 and LIB3103 (Monsanto Company, St Louis, Mo., United States of America).

[0067] In a preferred embodiment of the present invention, a lily protein or fragment thereof of the present invention is a homologue of another plant protein. In another preferred embodiment of the present invention, a lily protein or fragment thereof of the present invention is a homologue of a fungal protein. In another preferred embodiment of the present invention, a lily protein or fragment thereof of the present invention is a homologue of mammalian protein. In another preferred embodiment of the present invention, a lily protein or fragment thereof of the present invention is a homologue of a bacterial protein. In another preferred embodiment of the present invention, a lily protein or fragment thereof of the present invention is a homologue of an algal protein. In another preferred embodiment of the present invention, a lily protein or fragment thereof of the present invention is a homologue of a maize protein. In another preferred embodiment of the present invention, a lily protein or fragment thereof of the present invention is a homologue of a soybean protein. In another preferred embodiment of the present invention, a lily protein or fragment thereof of the present invention is a homologue of a cotton protein. In another preferred embodiment of the present invention, a lily protein or fragment thereof of the present invention is a homologue of a wheat protein.

[0068] In a preferred embodiment of the present invention, the nucleic molecule of the present invention encodes a lily protein or fragment thereof where a lily protein or fragment thereof exhibits a BLAST probability score of greater than 1E-12, preferably a BLAST probability score of between about 1E-30 and about 1E-12, even more preferably a BLAST probability score of greater than 1E-30 with its homologue.

[0069] In another preferred embodiment of the present invention, the nucleic acid molecule encoding a lily protein or fragment thereof exhibits a % identity with its homologue of between about 25% and about 40%, more preferably of between about 40 and about 70%, even more preferably of between about 70% and about 90% and even more preferably between about 90% and 99%. In another preferred embodiment, of the present invention, a lily protein or fragment thereof exhibits a % identity with its homologue of 100%.

[0070] In a preferred embodiment of the present invention, the nucleic molecule of the present invention encodes a lily protein or fragment thereof where the lily protein exhibits a BLAST score of greater than 120, preferably a BLAST score of between about 1450 and about 120, even more preferably a BLAST score of greater than 1450 with its homologue.

[0071] Nucleic acid molecules of the present invention also include non-lily homologues. Preferred non-lily homologues are selected from the group consisting of alfalfa, Arabidopsis, barley, Brassica, broccoli, cabbage, citrus, cotton, garlic, oat, oilseed rape, onion, canola, flax, an ornamental plant, maize, pea, peanut, pepper, potato, rice, rye, sorghum, soybean, strawberry, sugarcane, sugarbeet, tomato, wheat, poplar, pine, fir, eucalyptus, apple, lettuce, lentils, grape, banana, tea, turf grasses, sunflower, oil palm and Phaseolus.

[0072] The degeneracy of the genetic code, which allows different nucleic acid sequences to code for the same protein or peptide, is known in the literature. (U.S. Pat. No. 4,757,006, the entirety of which is herein incorporated by reference).

[0073] In an aspect of the present invention, one or more of the nucleic acid molecules of the present invention differ in nucleic acid sequence from those encoding a lily protein or fragment thereof in SEQ ID NO: 1 through SEQ ID NO: 6167 due to the degeneracy in the genetic code in that they encode the same protein but differ in nucleic acid sequence.

[0074] In another further aspect of the present invention, nucleic acid molecules of the present invention can comprise sequences, which differ from those encoding a protein or fragment thereof in SEQ ID NO: 1 through SEQ ID NO: 6167 due to fact that the different nucleic acid sequence encodes a protein having one or more conservative amino acid changes. It is understood that codons capable of coding for such conservative amino acid substitutions are known in the art.

[0075] It is well known in the art that one or more amino acids in a native sequence can be substituted with another amino acid(s), the charge and polarity of which are similar to that of the native amino acid, i.e., a conservative amino acid substitution, resulting in a silent change. Conserved substitutes for an amino acid within the native polypeptide sequence can be selected from other members of the class to which the naturally occurring amino acid belongs. Amino acids can be divided into the following four groups: (1) acidic amino acids, (2) basic amino acids, (3) neutral polar amino acids, and (4) neutral nonpolar amino acids. Representative amino acids within these various groups include, but are not limited to, (1) acidic (negatively charged) amino acids such as aspartic acid and glutamic acid; (2) basic (positively charged) amino acids such as arginine, histidine, and lysine; (3) neutral polar amino acids such as glycine, serine, threonine, cysteine, cystine, tyrosine, asparagine, and glutamine; and (4) neutral nonpolar (hydrophobic) amino acids such as alanine, leucine, isoleucine, valine, proline, phenylalanine, tryptophan, and methionine.

[0076] Conservative amino acid changes within the native polypeptides sequence can be made by substituting one amino acid within one of these groups with another amino acid within the same group. Biologically functional equivalents of the proteins or fragments thereof of the present invention can have 10 or fewer conservative amino acid changes, more preferably seven or fewer conservative amino acid changes, and most preferably five or fewer conservative amino acid changes. The encoding nucleotide sequence will thus have corresponding base substitutions, permitting it to encode biologically functional equivalent forms of the proteins or fragments of the present invention.

[0077] It is understood that certain amino acids may be substituted for other amino acids in a protein structure without appreciable loss of interactive binding capacity with structures such as, for example, antigent-binding regions of antibodies or binding sites on substrate molecules. Because it is the interactive capacity and nature of a protein that defines that protein's biological functional activity, certain amino acid sequence substitutions can be made in a protein sequence and, of course, its underlying DNA coding sequence and, nevertheless, obtain a protein with like properties. It is thus contemplated by the inventors that various changes may be made in the peptide sequences of the proteins or fragments of the present invention, or corresponding DNA sequences that encode said peptides, without appreciable loss of their biological utility or activity. It is understood that codons capable of coding for such amino acid changes are known in the art.

[0078] In making such changes, the hydropathic index of amino acids may be considered. The importance of the hydropathic amino acid index in conferring interactive biological function on a protein is generally understood in the art (Kyte and Doolittle, J. Mol. Biol. 157, 105-132 (1982), herein incorporated by reference in its entirety). It is accepted that the relative hydropathic character of the amino acid contributes to the secondary structure of the resultant protein, which in turn defines the interaction of the protein with other molecules, for example, enzymes, substrates, receptors, DNA, antibodies, antigens, and the like.

[0079] Each amino acid has been assigned a hydropathic index on the basis of its hydrophobicity and charge characteristics (Kyte and Doolittle, 1982); these are isoleucine (+4.5), valine (+4.2), leucine (+3.8), phenylalanine (+2.8), cysteine/cystine (+2.5), methionine (+1.9), alanine (+1.8), glycine (−0.4), threonine (−0.7), serine (−0.8), tryptophan (−0.9), tyrosine (−1.3), proline (−1.6), histidine (−3.2), glutamate (−3.5), glutanine (−3.5), aspartate (−3.5), asparagine (−3.5), lysine (−3.9), and arginine (−4.5).

[0080] In making such changes, the substitution of amino acids whose hydropathic indices are within ±2 is preferred, those which are within ±1 are particularly preferred, and those within ±0.5 are even more particularly preferred.

[0081] It is also understood in the art that the substitution of like amino acids can be made effectively on the basis of hydrophilicity. U.S. Pat. No. 4,554,101, incorporated herein by reference in its entirety, states that the greatest local average hydrophilicity of a protein, as govern by the hydrophilicity of its adjacent amino acids, correlates with a biological property of the protein.

[0082] As detailed in U.S. Pat. No. 4,554,101, the following hydrophilicity values have been assigned to amino acid residues: arginine (+3.0), lysine (+3.0), aspartate (+3.0±1), glutamate (+3.0±1), serine (+0.3), asparagine (+0.2), glutamine (+0.2), glycine (0), threonine (−0.4), proline (−0.5±1), alanine (−0.5), histidine (−0.5), cysteine (−1.0), methionine (−1.3), valine (−1.5), leucine (−1.8), isoleucine (−1.8), tyrosine (−2.3), phenylalanine (−2.5), and tryptophan (−3.4).

[0083] In making such changes, the substitution of amino acids whose hydrophilicity values are within ±2 is preferred, those which are within ±1 are particularly preferred, and those within ±0.5 are even more particularly preferred.

[0084] In a further aspect of the present invention, one or more of the nucleic acid molecules of the present invention differ in nucleic acid sequence from those encoding a lily protein or fragment thereof set forth in SEQ ID NO: 1 through SEQ ID NO: 6167 or fragment thereof due to the fact that one or more codons encoding an amino acid has been substituted for a codon that encodes a nonessential substitution of the amino acid originally encoded.

[0085] One aspect of the present invention concerns markers that include nucleic acid molecules SEQ ID NO: 1 through SEQ ID NO: 6167 or complements thereof or fragments of either that can act as markers or other nucleic acid molecules of the present invention that can act as markers. Genetic markers of the present invention include “dominant” or “codominant” markers “Codominant markers” reveal the presence of two or more alleles (two per diploid individual) at a locus. “Dominant markers” reveal the presence of only a single allele per locus. The presence of the dominant marker phenotype (e.g., a band of DNA) is an indication that one allele is present in either the homozygous or heterozygous condition. The absence of the dominant marker phenotype (e.g. absence of a DNA band) is merely evidence that “some other” undefined allele is present In the case of populations where individuals are predominantly homozygous and loci are predominately dimorphic, dominant and codominant markers can be equally valuable. As populations become more heterozygous and multi-allelic, codominant markers often become more informative of the genotype than dominant markers. Marker molecules can be, for example, capable of detecting polymorphisms such as single nucleotide polymorphisms (SNPs).

[0086] SNPs are single base changes in genomic DNA sequence. They occur at greater frequency and are spaced with a greater uniformity throughout a genome than other reported forms of polymorphism. The greater frequency and uniformity of SNPs means that there is greater probability that such a polymorphism will be found near or in a genetic locus of interest than would be the case for other polymorphisms. SNPs are located in protein-coding regions and noncoding regions of a genome. Some of these SNPs may result in defective or variant protein expression (e.g., as a results of mutations or defective splicing). Analysis (genotyping) of characterized SNPs can require only a plus/minus assay rather than a lengthy measurement, permitting easier automation.

[0087] SNPs can be characterized using any of a variety of methods. Such methods include the direct or indirect sequencing of the site, the use of restriction enzymes (Botstein et al., Am. J. Hum. Genet. 32:314-331 (1980); Konieczny and Ausubel, Plant J. 4:403-410 (1993); both of which are herein incorporated by reference in their entirety), enzymatic and chemical mismatch assays (Myers et al., Nature 313:495-498 (1985), herein incorporated by reference in its entirety), allele-specific PCR (Newton et al., Nucl. Acids Res. 17:2503-2516 (1989); Wu et al., Proc. Natl. Acad. Sci. (U.S.A.) 86:2757-2760 (1989); both of which are herein incorporated by reference in their entirety), ligase chain reaction (Barany, Proc. Natl. Acad. Sci. (U.S.A.) 88:189-193 (1991), herein incorporated by reference in its entirety), single-strand conformation polymorphism analysis (Labrune et al., Am. J. Hum. Genet. 48: 1115-1120 (1991), herein incorporated by reference in its entirety), primer-directed nucleotide incorporation assays (Kuppuswami et al., Proc. Natl. Acad. Sci. USA 88:1143-1147 (1991), herein incorporated by reference in its entirety), dideoxy fingerprinting (Sarkar et al., Genomics 13:441-443 (1992), herein incorporated by reference in its entirety), solid-phase ELISA-based oligonucleotide ligation assays (Nikiforov et al., Nucl. Acids Res. 22:4167-4175 (1994), herein incorporated by reference in its entirety), oligonucleotide fluorescence-quenching assays (Livak et al., PCR Methods Appl. 4:357-362 (1995), herein incorporated by reference in its entirety), 5′-nuclease allele-specific hybridization TaqMan assay (Livak et al., Nature Genet. 9:341-342 (1995), herein incorporated by reference in its entirety), template-directed dye-terminator incorporation (TDI) assay (Chen and Kwok, Nucl. Acids Res. 25:347-353 (1997), herein incorporated by reference in its entirety), allele-specific molecular beacon assay (Tyagi et al., Nature Biotech 16: 49-53 (1998), herein incorporated by reference in its entirety), PinPoint assay (Haff and Smirnov, Genome Res. 7: 378-388 (1997), herein incorporated by reference in its entirety) and dCAPS analysis (Neff et al., Plant J. 14:387-392 (1998), herein incorporated by reference in its entirety).

[0088] Additional markers, such as AFLP markers, RFLP markers and RAPD markers, can be utilized (Walton, Seed World 22-29 (July, 1993); Burow and Blake, Molecular Dissection of Complex Traits, 13-29, Paterson (ed.), CRC Press, New York (1988); both of which are herein incorporated by reference in their entirety). DNA markers can be developed from nucleic acid molecules using restriction endonucleases, the PCR and/or DNA sequence information. RFLP markers result from single base changes or insertions/deletions. These codominant markers are highly abundant in plant genomes, have a medium level of polymorphism and are developed by a combination of restriction endonuclease digestion and Southern blotting hybridization. CAPS are similarly developed from restriction nuclease digestion but only of specific PCR products. These markers are also codominant, have a medium level of polymorphism and are highly abundant in the genome. The CAPS result from single base changes and insertions/deletions.

[0089] Another marker type, RAPDs, are developed from DNA amplification with random primers and result from single base changes and insertions/deletions in plant genomes. They are dominant markers with a medium level of polymorphisms and are highly abundant. AFLP markers require using the PCR on a subset of restriction fragments from extended adapter primers. These markers are both dominant and codominant are highly abundant in genomes and exhibit a medium level of polymorphism.

[0090] SSRs require DNA sequence information. These codominant markers result from repeat length changes, are highly polymorphic and do not exhibit as high a degree of abundance in the genome as CAPS, AFLPs and RAPDs, SNPs also require DNA sequence information. These codominant markers result from single base substitutions. They are highly abundant and exhibit a medium of polymorphism (Rafalski et al., In: Nonmammalian Genomic Analysis, Birren and Lai (ed.), Academic Press, San Diego, Calif., pp. 75-134 (1996), herein incorporated by reference in its entirety). It is understood that a nucleic acid molecule of the present invention may be used as a marker.

[0091] A PCR probe is a nucleic acid molecule capable of initiating a polymerase activity while in a double-stranded structure with another nucleic acid. Various methods for determining the structure of PCR probes and PCR techniques exist in the art. Computer generated searches using programs such as Primer3 (www-genome.wi.mit.edu/cgi-bin/primer/primer3.cgi), STSPipeline (www-genome.wi.mit.edu/cgi-bin/www-STS_Pipeline), or GeneUp (Pesole et al., BioTechniques 25:112-123 (1998) the entirety of which is herein incorporated by reference), for example, can be used to identify potential PCR primers.

[0092] It is understood that a fragment of one or more of the nucleic acid molecules of the present invention may be a probe and specifically a PCR probe.

[0093] (b) Protein and Peptide Molecules

[0094] A class of agents comprises one or more of the protein or peptide molecules encoded by SEQ ID NO: 1 through SEQ ID NO:6167 or one or more of the protein or fragment thereof or peptide molecules encoded by other nucleic acid agents of the present invention. As used herein, the term “protein molecule” or “peptide molecule” includes any molecule that comprises five or more amino acids. It is well know in the art that proteins may undergo modification, including post-translational modifications, such as, but not limited to, disulfide bond formation, glycosylation, phosphorylation, or oligomerization. Thus, as used herein, the term “protein molecule” or “peptide molecule” includes any protein molecule that is modified by any biological or non-biological process. The terms “amino acid” and “amino acids” refer to all naturally occurring L-amino acids. This definition is meant to include norleucine, ornithine, homocysteine, and homoserine.

[0095] One or more of the protein or fragment of peptide molecules may be produced via chemical synthesis, or more preferably, by expression in a suitable bacterial or eukaryotic host. Suitable methods for expression are described by Sambrook, et al., (In: Molecular Cloning, A Laboratory Manual, 2nd Edition, Cold Spring Harbor Press, Cold Spring Harbor, N.Y. (1989)), or similar texts.

[0096] A “protein fragment” is a peptide or polypeptide molecule whose amino acid sequence comprises a subset of the amino acid sequence of that protein. A protein or fragment thereof that comprises one or more additional peptide regions not derived from that protein is a “fusion” protein. Such molecules may be derivatized to contain carbohydrate or other moieties (such as keyhole limpet hemocyanin, etc.). Fusion protein or peptide molecule of the present invention are preferably produced via recombinant means.

[0097] Another class of agents comprise protein or peptide molecules encoded by SEQ ID NO: 1 through SEQ ID NO:6167 or complements thereof or, fragments or fusions thereof in which non-essential, or not relevant, amino acid residues have been added, replaced, or deleted. An example of such a homologue is the homologue protein of all non-lily plant species, including but not limited to alfalfa, Arabidopsis, barley, Brassica, broccoli, cabbage, citrus, cotton, garlic, oat, oilseed rape, onion, canola, flax, maize, an ornamental plant, pea, peanut, pepper, potato, rice, rye, sorghum, soybean, strawberry, sugarcane, sugarbeet, tomato, wheat, poplar, pine, fir, eukalyptus, apple, lettuce, peas, lentils, grape, banana, tea, turf grasses, etc. Particularly preferred non-lily plants to utilize for the isolation of homologues would include alfalfa, Arabidopsis, barley, cotton, oat, oilseed rape, rice, corn, canola, ornamentals, soybean, sugarcane, sugarbeet, tomato, potato, wheat, and turf grasses. Such a homologue can be obtained by any of a variety of methods. Most preferably, as indicated above, one or more of the disclosed sequences (SEQ ID NO: 1 through SEQ ID NO:6167 or complements thereof) will be used to define a pair of primers that may be used to isolate the homologue-encoding nucleic acid molecules from any desired species. Such molecules can be expressed to yield homologues by recombinant means.

[0098] (c) Antibodies

[0099] One aspect of the present invention concerns antibodies, single-chain antigen binding molecules, or other proteins that specifically bind to one or more of the protein or peptide molecules of the present invention and their homologues, fusions or fragments. Such antibodies may be used to quantitatively or qualitatively detect the protein or peptide molecules of the present invention. As used herein, an antibody or peptide is said to “specifically bind” to a protein or peptide molecule of the present invention if such binding is not competitively inhibited by the presence of non-related molecules.

[0100] Nucleic acid molecules that encode all or part of the protein of the present invention can be expressed, via recombinant means, to yield protein or peptides that can in turn be used to elicit antibodies that are capable of binding the expressed protein or peptide. Such antibodies may be used in immunoassays for that protein. Such protein-encoding molecules, or their fragments may be a “fusion” molecule (i.e., a part of a larger nucleic acid molecule) such that, upon expression, a fusion protein is produced. It is understood that any of the nucleic acid molecules of the present invention may be expressed, via recombinant means, to yield proteins or peptides encoded by these nucleic acid molecules.

[0101] The antibodies that specifically bind proteins and protein fragments of the present invention may be polyclonal or monoclonal, and may comprise intact immunoglobulins, or antigen binding portions of immunoglobulins (such as (F(ab′), F(ab′)₂) fragments, or single-chain immunoglobulins producible, for example, via recombinant means). It is understood that practitioners are familiar with the standard resource materials which describe specific conditions and procedures for the construction, manipulation and isolation of antibodies (see, for example, Harlow and Lane, In Antibodies: A Laboratory Manual, Cold Spring Harbor Press, Cold Spring Harbor, N.Y. (1988), the entirety of which is herein incorporated by reference).

[0102] Murine monoclonal antibodies are particularly preferred. BALB/c mice are preferred for this purpose, however, equivalent strains may also be used. The animals are preferably immunized with approximately 25 μg of purified protein (or fragment thereof) that has been emulsified a suitable adjuvant (such as TiterMax adjuvant (Vaxcel, Norcross, Ga.)). Immunization is preferably conducted at two intramuscular sites, one intraperitoneal site, and one subcutaneous site at the base of the tail. An additional i.v. injection of approximately 25 μg of antigen is preferably given in normal saline three weeks later. After approximately 11 days following the second injection, the mice may be bled and the blood screened for the presence of anti-protein or peptide antibodies. Preferably, a direct binding Enzyme-Linked Immunoassay (ELISA) is employed for this purpose.

[0103] More preferably, the mouse having the highest antibody titer is given a third i.v. injection of approximately 25 μg of the same protein or fragment. The splenic leukocytes from this animal may be recovered 3 days later, and are then permitted to fuse, most preferably, using polyethylene glycol, with cells of a suitable myeloma cell line (such as, for example, the P3X63Ag8.653 myeloma cell line). Hybridoma cells are selected by culturing the cells under “HAT” (hypoxanthine-aminopterin-thymine) selection for about one week. The resulting clones may then be screened for their capacity to produce monoclonal antibodies (“mAbs), preferably by direct ELISA.

[0104] In one embodiment, anti-protein or peptide monoclonal antibodies are isolated using a fusion of a protein, protein fragment, or peptide of the present invention, or conjugate of a protein, protein fragment, or peptide of the present invention, as immunogens. Thus, for example, a group of mice can be immunized using a fusion protein emulsified in Freund's complete adjuvant (e.g. approximately 50 μg of antigen per immunization). At three week intervals, an identical amount of antigen is emulsified in Freund's incomplete adjuvant and used to immunize the animals. Ten days following the third immunization, serum samples are taken and evaluated for the presence of antibody. If antibody titers are too low, a fourth booster can be employed. Polysera capable of binding the protein or peptide can also be obtained using this method.

[0105] In a preferred procedure for obtaining monoclonal antibodies, the spleens of the above-described immunized mice are removed, disrupted, and immune splenocytes are isolated over a ficoll gradient. The isolated splenocytes are fused, using polyethylene glycol with BALB/c-derived HGPRT (hypoxanthine guanine phosphoribosyl transferase) deficient P3×63xAg8.653 plasmacytoma cells. The fused cells are plated into 96-well microtiter plates and screened for hybridoma fusion cells by their capacity to grow in culture medium supplemented with hypothanthine, aminopterin and thymidine for approximately 2-3 weeks.

[0106] Hybridoma cells that arise from such incubation are preferably screened for their capacity to produce an immunoglobulin that binds to a protein of interest. An indirect ELISA may be used for this purpose. In brief, the supernatants of hybridomas are incubated in microtiter wells that contain immobilized protein. After washing, the titer of bound immunoglobulin can be determined using, for example, a goat anti-mouse antibody conjugated to horseradish peroxidase. After additional washing, the amount of immobilized enzyme is determined (for example through the use of a chromogenic substrate). Such screening is performed as quickly as possible after the identification of the hybridoma in order to ensure that a desired clone is not overgrown by non-secreting neighbors. Desirably, the fusion plates are screened several times since the rates of hybridoma growth vary. In a preferred sub-embodiment, a different antigenic form of immunogen may be used to screen the hybridoma. Thus, for example, the splenocytes may be immunized with one immunogen, but the resulting hybridomas can be screened using a different immunogen. It is understood that any of the protein or peptide molecules of the present invention may be used to raise antibodies.

[0107] As discussed below, such antibody molecules or their fragments may be used for diagnostic purposes. Where the antibodies are intended for diagnostic purposes, it may be desirable to derivatize them, for example with a ligand group (such as biotin) or a detectable marker group (such as a fluorescent group, a radioisotope or an enzyme).

[0108] The ability to produce antibodies that bind the protein or peptide molecules of the present invention permits the identification of mimetic compounds of those molecules. A “mimetic compound” is a compound that is not that compound, or a fragment of that compound, but which nonetheless exhibits an ability to specifically bind to antibodies directed against that compound.

[0109] It is understood that any of the agents of the present invention can be substantially purified and/or be biologically active and/or recombinant.

[0110] Uses of the Agents of the Invention

[0111] The nucleic acid molecules and fragments thereof of the present invention from the cDNA library LIB3102 are isolated from early lily ovary tissue harvested from plants at the pre-meiotic to meiotic stage. Libraries from this tissue can enable acquisition of, including but not limited to, genes that are involved in reproduction, female production and development. The ESTs of the present invention will find great use in the isolation of a variety of agronomically significant genes, including but not limited to, non-regulatory genes and genes that regulate microsporogenesis, meiosis, cell cycle, signal transduction, cell-cell communication, carotenoids, floral biogenesis, embryogenesis, protein, amino acids, sterols, oils, minerals, isoflavones, saponins, vitamins, tocopherols, antinutrient components, carbohydrates, and starch metabolism. Such genes are associated with plant growth, quality, yield, and could also serve as links in important developmental, metabolic, and catabolic pathways. The ESTs of the present invention also can enable the acquisition of female-specific promoters and cis-regulatory elements which will be useful to express agronomically significant genes in these tissues and/or other tissues. The ESTs of the present invention also can enable the acquisition of molecular markers, which can be used in, including but not limited to, breeding schemes, genetic and molecular mapping, and cloning of agronomically significant genes. Libraries from this tissue can enable the acquisition of a variety of agronomically significant genes involved in the synthesis and catabolism of commercially important traits.

[0112] The nucleic acid molecules and fragments thereof of the present invention from the cDNA library LIB3103 are isolated from late lily ovule tissue harvested from plants at the mitotic to mature ovule stage. Libraries from this tissue can enable acquisition of, including but not limited to, genes that are involved in reproduction, female production and development. The ESTs of the present invention will find great use in the isolation of a variety of agronomically significant genes, including but not limited to, non-regulatory genes and genes that regulate microsporogenesis, meiosis, cell cycle, signal transduction, cell-cell communication, carotenoids, floral biogenesis, embryogenesis, protein, amino acids, sterols, oils, minerals, isoflavones, saponins, vitamins, tocopherols, antinutrient components, carbohydrates, and starch metabolism. Such genes are associated with plant growth, quality, yield, and could also serve as links in important developmental, metabolic, and catabolic pathways. The ESTs of the present invention also can enable the acquisition of female-specific promoters and cis-regulatory elements which will be useful to express agronomically significant genes in these tissues and/or other tissues. The ESTs of the present invention also can enable the acquisition of molecular markers, which can be used in, including but not limited to, breeding schemes, genetic and molecular mapping, and cloning of agronomically significant genes. Libraries from this tissue can enable the acquisition of a variety of agronomically significant genes involved in the synthesis and catabolism of commercially important traits.

[0113] Nucleic acid molecules and fragments thereof of the present invention may be employed to obtain other nucleic acid molecules. Such molecules include the nucleic acid molecules of other plants or other organisms (e.g., alfalfa, rice, potato, cotton, oat, rye, barley, maize, wheat, Arabidopsis, Brassica, etc.) including the nucleic acid molecules that encode, in whole or in part, protein homologues of other plant species or other organisms, and sequences of genetic elements such as promoters and transcriptional regulatory elements. Such molecules can be readily obtained by using the above-described nucleic acid molecules or fragments thereof to screen cDNA or genomic libraries obtained from such plant species. Methods for forming such libraries are well known in the art. Such homologue molecules may differ in their nucleotide sequences from those found in one or more of SEQ ID NO:1 through SEQ ID NO:6167 or complements thereof because complete complementarity is not needed for stable hybridization. The nucleic acid molecules of the present invention therefore also include molecules that, although capable of specifically hybridizing with the nucleic acid molecules may lack “complete complementarity.”

[0114] Any of a variety of methods may be used to obtain one or more of the above-described nucleic acid molecules (Zamechik et al., Proc. Natl. Acad. Sci. (U.S.A.) 83:4143-4146 (1986); Goodchild et al., Proc. Natl. Acad. Sci. (U.S.A.) 85:5507-5511 (1988); Wickstrom et al., Proc. Natl. Acad. Sci. (U.S.A.) 85:1028-1032 (1988); Holt, et al., Molec. Cell. Biol. 8:963-973 (1988); Gerwirtz, et al., Science 242:1303-1306 (1988); Anfossi, et al., Proc. Natl. Acad. Sci. (U.S.A.) 86:3379-3383 (1989); Becker, et al., EMBO J. 8:3685-3691 (1989); all of which are herein incorporated by reference in their entirety). Automated nucleic acid synthesizers may be employed for this purpose. In lieu of such synthesis, the disclosed nucleic acid molecules may be used to define a pair of primers that can be used with the polymerase chain reaction (Mullis, et al., Cold Spring Harbor Symp. Quant. Biol. 51:263-273 (1986); Erlich et al., EP 50,424; EP 84,796, EP 258,017, EP 237,362; Mullis, EP 201,184; Mullis et al., U.S. Pat. No. 4,683,202; Erlich, U.S. Pat. No. 4,582,788; and Saiki, R. et al., U.S. Pat. No. 4,683,194, all of which are hereby incorporated by reference in their entirety) to amplify and obtain any desired nucleic acid molecule or fragment.

[0115] Promoter sequence(s) and other genetic elements including but not limited to transcriptional regulatory elements associated with one or more of the disclosed nucleic acid sequences can also be obtained using the disclosed nucleic acid sequences provided herein.

[0116] In one embodiment, such sequences are obtained by incubating EST nucleic acid molecules or preferably fragments thereof with members of genomic libraries (e.g. lily, cotton, wheat, maize and soybean) and recovering clones that hybridize to the EST nucleic acid molecule or fragment thereof. In a second embodiment, methods of “chromosome walking,” or inverse PCR may be used to obtain such sequences (Frohman, et al., Proc. Natl. Acad. Sci. (U.S.A.) 85:8998-9002 (1988); Ohara, et al., Proc. Natl. Acad. Sci. (U.S.A.) 86: 5673-5677 (1989); Pang et al., Biotechniques, 22(6); 1046-1048 (1977); Huang et al., Methods Mol. Biol. 69: 89-96 (1977); Hartl et al., Methods Mol. Biol. 58: 293-301 (1996), all of which are hereby incorporated by reference in their entirety). In one embodiment, the disclosed nucleic acid molecules are used to identify cDNAs whose analogous genes contain promoters with desirable expression patterns. The nucleic acid molecules isolated from the library of the present invention are used to isolate promoters of tissue-enhanced, tissue-specific, developmentally- or environmentally-regulated expression profiles. Isolation and functional analysis of the 5′ flanking promoter sequences of these genes from genomic libraries, for example, using genomic screening methods and PCR techniques would result in the isolation of useful promoters and transcriptional regulatory elements. These methods are known to those of skill in the art and have been described (See for example Birren et al., Genome Analysis-Analyzing DNA, 1, (1997), Cold Spring Harbor Laboratory Press, Cold Spring Harbor, N.Y., the entirety of which is herein incorporated by reference).

[0117] Promoters obtained utilizing the nucleic acid molecules of the present invention could also be modified to affect their control characteristics. Examples of such modifications would include but are not limited to enhancer sequences as reported by Kay et al., Science 236:1299 (1987), herein incorporated by reference in its entirety. Such genetic elements could be used to enhance gene expression of new and existing traits for crop improvements.

[0118] The nucleic acid molecules of the present invention may be used to isolate promoters of tissue enhanced tissue specific, cell-specific, cell-type, developmentally or environmentally regulated expression profiles. Isolation and functional analysis of the 5′ flanking promoter sequences of these genes from genomic libraries, for example, using genomic screening methods and PCR techniques would result in the isolation of useful promoters and transcriptional regulatory elements. These methods are known to those of skill in the art and have been described (See, for example, Birren et. al., Genome Analysis: Analyzing DNA, 1, Cold Spring Harbor Laboratory Press, Cold Spring Harbor, N.Y. (1997), herein incorporated by reference in its entirety). Promoters obtained utilizing the nucleic acid molecules of the present invention could also be modified to affect their control characteristics. Examples of such modifications would include but are not limited to enhancer sequences as reported by Kay, et al Science 236:1299 (1987), herein incorporated reference in its entirety. Such genetic elements could be used to enhance gene expression of new and existing traits for crop improvements.

[0119] In an aspect of the present invention, one or more of the nucleic molecules of the present invention are used to determine whether a plant (preferably lily, corn, cotton, soybean and wheat) has a mutation affecting the level (i.e., the concentration of mRNA in a sample, etc.) or pattern (i.e., the kinetics of expression, rate of decomposition, stability profile, etc.) of the expression encoded in part or whole by one or more of the nucleic acid molecules of the present invention (collectively, the “Expression Response” of a cell or tissue). As used herein, the Expression Response manifested by a cell or tissue is said to be “altered” if it differs from the Expression Response of cells or tissues of plants not exhibiting the phenotype. To determine whether a Expression Response is altered, the Expression Response manifested by the cell or tissue of the plant exhibiting the phenotype is compared with that of a similar cell or tissue sample of a plant not exhibiting the phenotype. As will be appreciated, it is not necessary to re-determine the Expression Response of the cell or tissue sample of plants not exhibiting the phenotype each time such a comparison is made; rather, the Expression Response of a particular plant may be compared with previously obtained values of normal plants. As used herein, the phenotype of the organism is any of one or more characteristics of an organism (e.g. disease resistance, pest tolerance, environmental tolerance, male sterility, yield, quality improvements, etc.). A change in genotype or phenotype may be transient or permanent. Also as used herein, a tissue sample is any sample that comprises more than one cell. In a preferred aspect, a tissue sample comprises cells that share a common characteristic (e.g. derived from leaf, root, or pollen etc).

[0120] In one sub-aspect, such an analysis is conducted by determining the presence and/or identity of polymorphism(s) by one or more of the nucleic acid molecules of the present invention and more specifically, one or more of the EST nucleic acid molecules or fragments thereof which are associated with phenotype, or a predisposition to phenotype.

[0121] Any of a variety of molecules can be used to identify such polymorphism(s). In one embodiment, one or more of the EST nucleic acid molecules (or a sub-fragment thereof) may be employed as a marker nucleic acid molecule to identify such polymorphism(s). Alternatively, such polymorphisms can be detected through the use of a marker nucleic acid molecule or a marker protein that is genetically linked to (i.e., a polynucleotide that co-segregates with) such polymorphism(s).

[0122] In an alternative embodiment, such polymorphisms can be detected through the use of a marker nucleic acid molecule that is physically linked to such polymorphism(s). For this purpose, marker nucleic acid molecules comprising a nucleotide sequence of a polynucleotide located within 1 mb of the polymorphism(s), and more preferably within 100 kb of the polymorphism(s), and most preferably within 10 kb of the polymorphism(s) can be employed.

[0123] The genomes of animals and plants naturally undergo spontaneous mutation in the course of their continuing evolution (Gusella, Ann. Rev. Biochem. 55:831-854 (1986)). A “polymorphism” is a variation or difference in the sequence of the gene or its flanking regions that arises in some of the members of a species. The variant sequence and the “original” sequence co-exist in the species' population. In some instances, such co-existence is in stable or quasi-stable equilibrium.

[0124] A polymorphism is thus said to be “allelic,” in that, due to the existence of the polymorphism, some members of a species may have the original sequence (i.e., the original “allele”) whereas other members may have the variant sequence (i.e., the variant “allele”). In the simplest case, only one variant sequence may exist, and the polymorphism is thus said to be di-allelic. In other cases, the species' population may contain multiple alleles, and the polymorphism is termed tri-allelic, etc. A single gene may have multiple different unrelated polymorphisms. For example, it may have a di-allelic polymorphism at one site, and a multi-allelic polymorphism at another site.

[0125] The variation that defines the polymorphism may range from a single nucleotide variation to the insertion or deletion of extended regions within a gene. In some cases, the DNA sequence variations are in regions of the genome that are characterized by short tandem repeats (STRs) that include tandem di- or tri-nucleotide repeated motifs of nucleotides. Polymorphisms characterized by such tandem repeats are referred to as “variable number tandem repeat” (“VNTR”) polymorphisms. VNTRs have been used in identity analysis (Weber, U.S. Pat. No. 5,075,217; Armour, et al., FEBS Let. 307:113-115 (1992); Jones, et al., Eur. J. Haematol. 39:144-147 (1987); Horn, et al., PCT Application WO91/14003; Jeffreys, European Patent Application 370,719; Jeffreys, U.S. Pat. No. 5,699,082; Jeffreys. et al., Amer. J. Hum. Genet. 39:11-24 (1986); Jeffreys. et al., Nature 316:76-79 (1985); Gray, et al., Proc. R. Acad Soc. Lond. 243:241-253 (1991); Moore, et al., Genomics 10:654-660 (1991); Jeffreys, et al, Anim. Genet. 18:1-15 (1987); Hillel, et al., Anim. Genet. 20:145-155 (1989); Hillel, et al, Genet. 124:783-789 (1990), all of which are herein incorporated by reference in their entirety).

[0126] The detection of polymorphic sites in a sample of DNA may be facilitated through the use of nucleic acid amplification methods. Such methods specifically increase the concentration of polynucleotides that span the polymorphic site, or include that site and sequences located either distal or proximal to it. Such amplified molecules can be readily detected by gel electrophoresis or other means.

[0127] The most preferred method of achieving such amplification employs the polymerase chain reaction (“PCR”) (Mullis, et al, Cold Spring Harbor Symp. Quant. Biol. 51:263-273 (1986); Erlich, et al., European Patent Appln. 50,424; European Patent Appln. 84,796, European Patent Application 258,017, European Patent Appln. 237,362; Mullis, European Patent Appln. 201,184; Mullis, et al., U.S. Pat. No. 4,683,202; Erlich, U.S. Pat. No. 4,582,788; and Saiki, et al., U.S. Pat. No. 4,683,194, all of which are herein incorporated by reference), using primer pairs that are capable of hybridizing to the proximal sequences that define a polymorphism in its double-stranded form.

[0128] In lieu of PCR, alternative methods, such as the “Ligase Chain Reaction” (“LCR”) may be used (Barany, Proc. Natl. Acad. Sci. (U.S.A.) 88:189-193 (1991), the entirety of which is herein incorporated by reference). LCR uses two pairs of oligonucleotide probes to exponentially amplify a specific target. The sequences of each pair of oligonucleotides is selected to permit the pair to hybridize to abutting sequences of the same strand of the target. Such hybridization forms a substrate for a template-dependent ligase. As with PCR, the resulting products thus serve as a template in subsequent cycles and an exponential amplification of the desired sequence is obtained.

[0129] LCR can be performed with oligonucleotides having the proximal and distal sequences of the same strand of a polymorphic site. In one embodiment, either oligonucleotide will be designed to include the actual polymorphic site of the polymorphism. In such an embodiment, the reaction conditions are selected such that the oligonucleotides can be ligated together only if the target molecule either contains or lacks the specific nucleotide that is complementary to the polymorphic site present on the oligonucleotide. Alternatively, the oligonucleotides may be selected such that they do not include the polymorphic site (see, Segev, PCT Application WO 90/01069, the entirety of which is herein incorporated by reference).

[0130] The “Oligonucleotide Ligation Assay” (“OLA”) may alternatively be employed (Landegren, et al., Science 241:1077-1080 (1988), herein incorporated by reference in its entirety). The OLA protocol uses two oligonucleotides which are designed to be capable of hybridizing to abutting sequences of a single strand of a target. OLA, like LCR, is particularly suited for the detection of point mutations. Unlike LCR, however, OLA results in “linear” rather than exponential amplification of the target sequence.

[0131] Nickerson, et al. have described a nucleic acid detection assay that combines attributes of PCR and OLA (Nickerson, et al., Proc. Natl. Acad. Sci. (U.S.A.) 87:8923-927 (1990), the entirety of which is herein incorporated by reference). In this method, CR is used to achieve the exponential amplification of target DNA, which is then detected using OLA. In addition to requiring multiple, and separate, processing steps, one problem associated with such combinations is that they inherit all of the problems associated with PCR and OLA.

[0132] Schemes based on ligation of two (or more) oligonucleotides in the presence of nucleic acid having the sequence of the resulting “di-oligonucleotide”, thereby amplifying the di-oligonucleotide, are also known (Wu, et al., Genomics 4:560 (1989), the entirety of which is herein incorporated by reference), and may be readily adapted to the purposes of the present invention.

[0133] Other known nucleic acid amplification procedures, such as allele-specific oligomers, branched DNA technology, transcription-based amplification systems, or isothermal amplification methods may also be used to amplify and analyze such polymorphisms (Malek, et al., U.S. Pat. No. 5,130,238; Davey, et al., European Patent Application 329,822; Schuster et al, U.S. Pat. No. 5,169,766; Miller, et al., PCT Application WO 89/06700; Kwoh, et al., Proc. Natl. Acad. Sci. (U.S.A.) 86:1173-1177 (1989); Gingeras, et al., PCT Application WO 88/10315; Walker, et al., Proc. Natl. Acad. Sci. (U.S.A.) 89:392-396 (1992), all of which are herein incorporated by reference in their entirety).

[0134] The identification of a polymorphism can be determined in a variety of ways. By correlating the presence or absence of it in a plant with the presence or absence of a phenotype, it is possible to predict the phenotype of that plant. If a polymorphism creates or destroys a restriction endonuclease cleavage site, or if it results in the loss or insertion of DNA (e.g., a VNTR polymorphism), it will alter the size or profile of the DNA fragments that are generated by digestion with that restriction endonuclease. As such, individuals that possess a variant sequence can be distinguished from those having the original sequence by restriction fragment analysis. Polymorphisms that can be identified in this manner are termed “restriction fragment length polymorphisms” (“RFLPs”). RFLPs have been widely used in human and plant genetic analyses (Glassberg, UK Patent Application 2135774; Skolnick, et al., Cytogen Cell Genet. 32:58-67 (1982); Botstein, et al., Ann. J. Hum. Genet. 32:314-331 (1980); Fischer, et al. (PCT Application WO90/13668); Uhlen, PCT Application WO90/11369).

[0135] Polymorphisms can also be identified by Single Strand Conformation Polymorphism (SSCP) analysis. The SSCP technique is a method capable of identifing most sequence variations in a single strand of DNA, typically between 150 and 250 nucleotides in length (Elles, Methods in Molecular Medicine: Molecular Diagnosis of Genetic Diseases, Humana Press (1996); Orita et al., Genomics 5: 874-879 (1989); both of which are herein incorporated by reference in their entirety). Under denaturing conditions a single strand of DNA will adopt a conformation that is uniquely dependent on its sequence conformation. This conformation usually will be different, even if only a single base is changed. Most conformations have been reported to alter the physical configuration or size sufficiently to be detectable by electrophoresis. A number of protocols have been described for SSCP including, but not limited to Lee et al., Anal. Biochem. 205: 289-293 (1992), the entirety of which is herein incorporated by reference; Suzuki et al., Anal. Biochem 192: 82-84 (1991), the entirety of which is herein incorporated by reference; Lo et al., Nucleic Acids Research 20: 1005-1009 (1992), the entirety of which is herein incorporated by reference; Sarkar et al., Genomics 13: 441-443 (1992), the entirety of which is herein incorporated by reference). It is understood that one or more of the nucleic acids of the present invention, may be utilized as markers or probes to detect polymorphisms by SSCP analysis.

[0136] Polymorphisms may also be found using a DNA fingerprinting technique called amplified fragment length polymorphism (AFLP), which is based on the selective PCR amplification of restriction fragments from a total digest of genomic DNA to profile that DNA. Vos, et al., Nucleic Acids Res. 23:4407-4414 (1995), the entirety of which is herein incorporated by reference. This method allows for the specific co-amplification of high numbers of restriction fragments, which can be visualized by PCR without knowledge of the nucleic acid sequence.

[0137] AFLP employs basically three steps. Initially, a sample of genomic DNA is cut with restriction enzymes and oligonucleotide adapters are ligated to the restriction fragments of the DNA. The restriction fragments are then amplified using PCR by using the adapter and restriction sequence as target sites for primer annealing. The selective amplification is achieved by the use of primers that extend into the restriction fragments, amplifying only those fragments in which the primer extensions match the nucleotide flanking the restriction sites. These amplified fragments are then visuanlized on a denaturing polyacrylamide gel.

[0138] AFLP analysis has been performed on Salix (Beismann, et al., Mol. Ecol. 6:989-993 (1997), herein incorporated by reference in its entirety); Acinetobacter (Janssen, et al, Int. J. Syst. Bacteriol 47:1179-1187 (1997), herein incorporated by reference in its entirety), Aeromonaspopoffi (Huys, et al., Int. J. Syst. Bacteriol. 47:1165-1171 (1997), herein incorporated by reference in its entirety), rice (McCouch, et al., Plant Mol. Biol. 35:89-99 (1997); Nandi, et al., Mol. Gen. Genet. 255:1-8 (1997); Cho, et al., Genome 39:373-378 (1996), all of which are herein incorporated by reference in their entirety), barley (Hordeum vulgare) (Simons, et al., Genomics 44:61-70 (1997); Waugh, et al., Mol. Gen. Genet. 255:311-321 (1997); Qi, et al., Mol. Gen. Genet. 254:330-336 (1997); Becker, et al., Mol. Gen. Genet. 249:65-73 (1995), all of which are herein incorporated by reference in their entirety), potato (Van der Voort, et al., Mol. Gen. Genet. 255:438-447 (1997); Meksem, et al., Mol. Gen. Genet. 249:74-81 (1995), both of which are herein incorporated by reference in their entirety), Phytophthora infestans (Van der Lee, et al., Fungal Genet. Biol. 21:278-291 (1997), herein incorporated by reference in its entirety), Bacillus anthracis (Keirn, et al., J. Bacteriol. 179:818-824 (1997), herein incorporated by reference in its entirety), Astragalus cremnophylar (Travis, et al., Mol. Ecol. 5:735-745 (1996), herein incorporated by reference in its entirety), Arabidopsis (Cnops, et al., Mol. Gen. Genet. 253:32-41 (1996), herein incorporated by reference in its entirety), Escherichia coli (Lin, et al., Nucleic Acids Res. 24:3649-3650 (1996), herein incorporated by reference in its entirety), Aeromonas (Huys, et al., Int. J. Syst. Bacteriol. 46:572-580 (1996), herein incorporated by reference in its entirety), nematode (Folkertsma, et al., Mol. Plant. Microbe Interact. 9:47-54 (1996), herein incorporated by reference in its entirety), tomato (Thomas, et al., Plant J. 8:785-794 (1995), herein incorporated by reference in its entirety), and human (Latorra, et al., PCR Methods Appl. 3:351-358 (1994), herein incorporated by reference in its entirety). AFLP analysis has also been used for fingerprinting mRNA (Money, et al., Nucleic Acids Res. 24:2616-2617 (1996); Bachem, et al., Plant J. 9:745-753 (1996), both of which are herein incorporated by reference in their entirety). It is understood that one or more of the nucleic acids of the present invention, may be utilized as markers or probes to detect polymorphisms by AFLP analysis for fingerprinting mRNA.

[0139] Polymorphisms may also be found using random amplified polymorphic DNA (RAPD) (Williams et al., Nucl. Acids Res. 18: 6531-6535 (1990), herein incorporated by reference in its entirety) and cleaveable amplified polymorphic sequences (CAPS) (Lyamichev et al., Science 260: 778-783 (1993), herein incorporated by reference in its entirety). It is understood that one or more of the nucleic acids of the present invention, may be utilized as markers or probes to detect polymorphisms by RAPD or CAPS analysis.

[0140] Polymorphisms are useful, through linkage analysis, to define the genetic distances or physical distances between polymorphic traits. A physical map or ordered array of genomic DNA fragments in the desired region containing the gene may be used to characterize and isolate genes corresponding to desirable traits. For this purpose, yeast artificial chromosomes (YACs), bacterial artificial chromosomes (BACs), and cosmids are appropriate vectors for cloning large segments of DNA molecules. Although fewer clones are needed to make a contig for a specific genomic region by using YACs (Agyare et al., Genome Res. 7: 1-9 (1997); James et al., Genomics 32: 425-430 (1996), both of which are herein incorporated by reference in their entirety), chimerism in the inserted DNA fragment can arise. Cosmids are convenient for handling smaller-size DNA molecules and may be used for transformation in developing transgenic plants. BACs also carry DNA fragments and are less prone to chimerism.

[0141] Through genetic mapping, a fine scale linkage map can be developed using DNA markers and, then, a genomic DNA library of large-sized fragments can be screened with molecular markers linked to the desired trait. Molecular markers are advantageous for agronomic traits that are otherwise difficult to tag, such as resistance to pathogens, insects and nematodes, tolerance to abiotic stress, quality parameters and quantitative traits such as high yield potential.

[0142] The essential requirements for marker-assisted selection in a plant breeding program are: (1) the marker(s) should co-segregate or be closely linked with the desired trait; (2) an efficient means of screening large populations for the molecular marker(s) should be available; and (3) the screening technique should have high reproducibility across laboratories and preferably be economical to use and be user-friendly.

[0143] The genetic linkage of marker molecules can be established by a gene mapping model such as, without limitation, the flanking marker model reported by Lander and Botstein, Genetics 121:185-199 (1989) and the interval mapping, based on maximum likelihood methods described by Lander and Botstein, Genetics 121:185-199 (1989) and implemented in the software package MAPMAKER/QTL (Lincoln and Lander, Mapping Genes Controlling Quantitative Traits Using MAPAKER/QTL, Whitehead Institute for Biomedical Research, Massachusetts, (1990). Additional software includes Qgene, Version 2.23 (1996), Department of Plant Breeding and Biometry, 266 Emerson Hall, Cornell University, Ithaca, N.Y., the manual of which is herein incorporated by reference in its entirety). Use of Qgene software is a particularly preferred approach.

[0144] A maximum likelihood estimate (MLE) for the presence of a marker is calculated, together with an MLE assuming no QTL effect, to avoid false positives. A log₁₀ of an odds ratio (LOD) is then calculated as: LOD=log₁₀ (MLE for the presence of a QTL/MLE given no linked QTL).

[0145] The LOD score essentially indicates how much more likely the data are to have arisen assuming the presence of a QTL than in its absence. The LOD threshold value for avoiding a false positive with a given confidence, say 95%, depends on the number of markers and the length of the genome. Graphs indicating LOD thresholds are set forth in Lander and Botstein, Genetics 121:185-199 (1989) the entirety of which is herein incorporated by reference and further described by Arùus and Moreno-Gonzàlez, Plant Breeding, Hayward et al., (eds.) Chapman & Hall, London, pp. 314-331 (1993), the entirety of which is herein incorporated by reference.

[0146] Additional models can be used. Many modifications and alternative approaches to interval mapping have been reported, including the use of non-parametric methods (Kruglyak and Lander, Genetics 139:1421-1428 (1995), the entirety of which is herein incorporated by reference). Multiple regression methods or models can be also be used, in which the trait is regressed on a large number of markers (Jansen, Biometrics in Plant Breeding, van Oijen and Jansen (eds.), Proceedings of the Ninth Meeting of the Eucarpia Section Biometrics in Plant Breeding, The Netherlands, pp. 116-124 (1994); Weber and Wricke, Advances in Plant Breeding, Blackwell; Berlin, 16 (1994), both of which are herein incorporated by reference in their entirety). Procedures combining interval mapping with regression analysis, whereby the phenotype is regressed onto a single putative QTL at a given marker interval and at the same time onto a number of markers that serve as ‘cofactors,’ have been reported by Jansen and Stam, Genetics 136:1447-1455 (1994), the entirety of which is herein incorporated by reference and Zeng, Genetics 136:1457-1468 (1994) the entirety of which is herein incorporated by reference. Generally, the use of cofactors reduces the bias and sampling error of the estimated QTL positions (Utz and Melchinger, Biometrics in Plant Breeding, van Oijen and Jansen (eds.) Proceedings of the Ninth Meeting of the Eucarpia Section Biometrics in Plant Breeding, The Netherlands, pp. 195-204 (1994), the entirety of which is herein incorporated by reference, thereby improving the precision and efficiency of QTL mapping (Zeng, Genetics 136:1457-1468 (1994)). These models can be extended to multi-environment experiments to analyze genotype-environment interactions (Jansen et al., Theo. Appl. Genet. 91:33-37 (1995), the entirety of which is herein incorporated by reference).

[0147] Selection of an appropriate mapping population is important to map construction. The choice of an appropriate mapping population depends on the type of marker systems employed (Tanksley et al., Molecular mapping plant chromosomes. Chromosome structure and function: Impact of new concepts, Gustafson and Appels (eds.), Plenum Press, New York, pp 157-173 (1988), the entirety of which is herein incorporated by reference). Consideration must be given to the source of parents (adapted vs. exotic) used in the mapping population. Chromosome pairing and recombination rates can be severely disturbed (suppressed) in wide crosses (adapted x exotic) and generally yield greatly reduced linkage distances. Wide crosses will usually provide segregating populations with a relatively large array of polymorphisms when compared to progeny in a narrow cross (adapted x adapted).

[0148] An F₂ population is the first generation of selfing after the hybrid seed is produced. Usually a single F₁ plant is selfed to generate a population segregating for all the genes in Mendelian (1:2:1) fashion. Maximum genetic information is obtained from a completely classified F₂ population using a codominant marker system (Mather, Measurement of Linkage in Heredity, Methuen and Co., (1938), the entirety of which is herein incorporated by reference). In the case of dominant markers, progeny tests (e.g. F₃, BCF₂) are required to identify the heterozygotes, thus making it equivalent to a completely classified F₂ population. However, this procedure is often prohibitive because of the cost and time involved in progeny testing. Progeny testing of F₂ individuals is often used in map construction where phenotypes do not consistently reflect genotype (e.g. disease resistance) or where trait expression is controlled by a QTL. Segregation data from progeny test populations (e.g. F₃ or BCF₂) can be used in map construction. Marker-assisted selection can then be applied to cross progeny based on marker-trait map associations (F₂, F₃), where linkage groups have not been completely disassociated by recombination events (i.e., maximum disequillibrium).

[0149] Recombinant inbred lines (RIL) (genetically related lines; usually >F₅, developed from continuously selfing F₂ lines towards homozygosity) can be used as a mapping population. Information obtained from dominant markers can be maximized by using RIL because all loci are homozygous or nearly so. Under conditions of tight linkage (i.e., about <10% recombination), dominant and co-dominant markers evaluated in RIL populations provide more information per individual than either marker type in backcross populations (Reiter et al., Proc. Natl. Acad. Sci. (U.S.A.) 89:1477-1481 (1992), the entirety of which is herein incorporated by reference). However, as the distance between markers becomes larger (i.e., loci become more independent), the information in RIL populations decreases dramatically when compared to codominant markers.

[0150] Backcross populations (e.g., generated from a cross between a successful variety (recurrent parent) and another variety (donor parent) carrying a trait not present in the former) can be utilized as a mapping population. A series of backcrosses to the recurrent parent can be made to recover most of its desirable traits. Thus a population is created consisting of individuals nearly like the recurrent parent but each individual carries varying amounts or mosaic of genomic regions from the donor parent. Backcross populations can be useful for mapping dominant markers if all loci in the recurrent parent are homozygous and the donor and recurrent parent have contrasting polymorphic marker alleles (Reiter et al., Proc. Natl. Acad. Sci. (U.S.A.) 89:1477-1481 (1992)). Information obtained from backcross populations using either codominant or dominant markers is less than that obtained from F₂ populations because one, rather than two, recombinant gametes are sampled per plant Backcross populations, however, are more informative (at low marker saturation) when compared to RILs as the distance between linked loci increases in RIL populations (i.e. about 15% recombination). Increased recombination can be beneficial for resolution of tight linkages, but may be undesirable in the construction of maps with low marker saturation.

[0151] Near-isogenic lines (NIL) created by many backcrosses to produce an array of individuals that are nearly identical in genetic composition except for the trait or genomic region under interrogation can be used as a mapping population. In mapping with NILs, only a portion of the polymorphic loci are expected to map to a selected region.

[0152] Bulk segregant analysis (BSA) is a method developed for the rapid identification of linkage between markers and traits of interest (Michelmore et al., Proc. Natl. Acad. Sci. (U.S.A.) 88:9828-9832 (1991), the entirety of which is herein incorporated by reference). In BSA, two bulked DNA samples are drawn from a segregating population originating from a single cross. These bulks contain individuals that are identical for a particular trait (resistant or susceptible to particular disease) or genomic region but arbitrary at unlinked regions (i.e. heterozygous). Regions unlinked to the target region will not differ between the bulked samples of many individuals in BSA.

[0153] It is understood that one or more of the nucleic acid molecules of the present invention may be used as molecular markers. It is also understood that one or more of the protein molecules of the present invention may be used as molecular markers.

[0154] In accordance with this aspect of the present invention, a sample nucleic acid is obtained from plants cells or tissues. Any source of nucleic acid may be used. Preferably, the nucleic acid is genomic DNA. The nucleic acid is subjected to restriction endonuclease digestion. For example, one or more EST nucleic acid molecule or fragment thereof can be used as a probe in accordance with the above-described polymorphic methods. The polymorphism obtained in this approach can then be cloned to identify the mutation at the coding region which alters the protein's structure or regulatory region of the gene which affects its expression level.

[0155] In one aspect of the present invention, an evaluation can be conducted to determine whether a particular mRNA molecule is present. One or more of the nucleic acid molecules of the present invention, preferably one or more of the EST nucleic acid molecules of the present invention are utilized to detect the presence or quantity of the mRNA species. Such molecules are then incubated with cell or tissue extracts of a plant under conditions sufficient to permit nucleic acid hybridization. The detection of double-stranded probe-mRNA hybrid molecules is indicative of the presence of the mRNA; the amount of such hybrid formed is proportional to the amount of mRNA. Thus, such probes may be used to ascertain the level and extent of the mRNA production in a plant's cells or tissues. Such nucleic acid hybridization may be conducted under quantitative conditions (thereby providing a numerical value of the amount of the mRNA present). Alternatively, the assay may be conducted as a qualitative assay that indicates either that the mRNA is present, or that its level exceeds a user set, predefined value.

[0156] A principle of in situ hybridization is that a labeled, single-stranded nucleic acid probe will hybridize to a complementary strand of cellular DNA or RNA and, under the appropriate conditions, these molecules will form a stable hybrid. When nucleic acid hybridization is combined with histological techniques, specific DNA or RNA sequences can be identified within a single cell. An advantage of in situ hybridization over more conventional techniques for the detection of nucleic acids is that it allows an investigator to determine the precise spatial population (Angerer et al., Dev. Biol. 101: 477-484 (1984); Angerer et al., Dev. Biol. 112:157-166 (1985); Dixon et al., EMBO J. 10: 1317-1324 (1991), all of which are herein incorporated by reference in their entirety). In situ hybridization may be used to measure the steady-state level of RNA accumulation. It is a sensitive technique and RNA sequences present in as few as 5-10 copies per cell can be detected (Hardin et al, J. Mol. Biol. 202: 417-431. (1989), the entirety of which is herein incorporated by reference). A number of protocols have been devised for in situ hybridization, each with tissue preparation, hybridization, and washing conditions (Meyerowitz, Plant Mol. Biol. Rep. 5: 242-250 (1987); Cox and Goldberg, In: Plant Molecular Biology: A Practical Approach (ed. C. H. Shaw), pp. 1-35. IRL Press, Oxford (1988); Raikhel et al., In situ RNA hybridization in plant tissues. In Plant Molecular Biology Manual, vol. B9: 1-32. Kluwer Academic Publisher, Dordrecht, Belgium (1989), all of which are herein incorporated by reference in their entirety).

[0157] In situ hybridization also allows for the localization of proteins within a tissue or cell (Wilkinson, In Situ Hybridization, Oxford University Press, Oxford (1992); Langdale, In Situ Hybridization 165-179 In: The Maize Handbook, eds. Freeling and Walbot, Springer-Verlag, New York (1994), both of which are herein incorporated by reference in their entirety). It is understood that one or more of the molecules of the present invention, preferably one or more of the EST nucleic acid molecules of the present invention or one or more of the antibodies of the present invention may be utilized to detect the level or pattern of a protein or fragment thereof by in situ hybridization.

[0158] Fluorescent in situ hybridization also enables the localization of a particular DNA sequence along a chromosome which is useful, among other uses, for gene mapping, following chromosomes in hybrid lines or detecting chromosomes with translocations, transversions or deletions. In situ hybridization has been used to identify chromosomes in several plant species (Griffor et al., Plant Mol. Biol. 17: 101-109 (1991); Gustafson et al., Proc. Nat'l. Acad. Sci. (U.S.A.). 87:1899-1902 (1990); Mukai and Gill, Genome 34: 448-452. (1991); Schwarzacher and Heslop-Harrison, Genome 34: 317-323 (1991); Wang et al., Jpn. J. Genet. 66: 313-316 (1991); Parra and Windle, Nature Genetics, 5: 17-21 (1993), all of which are herein incorporated by reference in their entirety). It is understood that the nucleic acid molecules of the present invention may be used as probes or markers to localize sequences along a chromosome.

[0159] It is also understood that one or more of the molecules of the present invention, preferably one or more of the EST nucleic acid molecules of the present invention or one or more of the antibodies of the present invention may be utilized to detect the expression level or pattern of a protein or mRNA thereof by in situ hybridization.

[0160] Another method to localize the expression of a molecule is tissue printing. Tissue printing provides a way to screen, at the same time on the same membrane many tissue sections from different plants or different developmental stages. Tissue-printing procedures utilize films designed to immobilize proteins and nucleic acids. In essence, a freshly cut section of an organ is pressed gently onto nitrocellulose paper, nylon membrane or polyvinylidene difluoride membrane. Such membranes are commercially available (e.g. Millipore, Bedford, Mass.). The contents of the cut cell transfer onto the membrane, and the molecules are immobilized to the membrane. The immobilized molecules form a latent print that can be visualized with appropriate probes. When a plant tissue print is made on nitrocellulose paper, the cell walls leave a physical print that makes the anatomy visible without further treatment (Varner and Taylor, Plant Physiol. 91: 31-33 (1989), the entirety of which is herein incorporated by reference).

[0161] Tissue printing on substrate films is described by Daoust, Exp. Cell Res. 12: 203-211 (1957), the entirety of which is herein incorporated by reference, who detected amylase, protease, ribonuclease, and deoxyribonuclease in animal tissues using starch, gelatin, and agar films. These techniques can be applied to plant tissues (Yomo and Taylor, Planta 112:3543 (1973); Harris and Chrispeels, Plant Physiol. 56: 292-299 (1975). Advances in membrane technology have increased the range of applications of Daoust's tissue-printing techniques allowing (Cassab and Varner, J. Cell. Biol. 105: 2581-2588 (1987), the entirety of which is herein incorporated by reference; the histochemical localization of various plant enzymes and deoxyribonuclease on nitrocellulose paper and nylon (Spruce et al., Phytochemistry, 26: 2901-2903 (1987); Barres et al. Neuron 5: 527-544 (1990); Reid and Pont-Lezica, Tissue Printing: Tools for the Study of Anatomy, Histochemistry, and Gene Expression, Academic Press, New York, N.Y. (1992); Reid et al. Plant Physiol. 93: 160-165 (1990); Ye et al. Plant J. 1: 175-183 (1991), all of which are herein incorporated by reference in their entirety).

[0162] It is understood that one or more of the molecules of the present invention, preferably one or more of the EST nucleic acid molecules of the present invention or one or more of the antibodies of the present invention may be utilized to detect the presence or quantity of a protein by tissue printing.

[0163] Further, it is also understood that any of the nucleic acid molecules of the present invention may be used as marker nucleic acids and or probes in connection with methods that require probes or marker nucleic acids. As used herein, a probe is an agent that is utilized to determine an attribute or feature (e.g. presence or absence, location, correlation, etc.) or a molecule, cell, tissue or plant. As used herein, a marker nucleic acid is a nucleic acid molecule that is utilized to determine an attribute or feature (e.g., presence or absence, location, correlation, etc.) or a molecule, cell, tissue or plant.

[0164] A microarray-based method for high-throughput monitoring of plant gene expression may be utilized to measure gene-specific hybridization targets. This ‘chip’-based approach involves using microarrays of nucleic acid molecules as gene-specific hybridization targets to quantitatively measure expression of the corresponding plant genes (Schena et al., Science 270: 467-470 (1995); Shalon, Ph.D. Thesis. Stanford University (1996), both of which are herein incorporated by reference in their entirety). Every nucleotide in a large sequence can be queried at the same time. Hybridization can be used to efficiently analyze large amounts of nucleotide sequence.

[0165] Several microarray methods have been described. One method compares the sequences to be analyzed by hybridization to a set of oligonucleotides representing all possible subsequences (Bains and Smith, J. Theor. Biol. 135: 303 (1989), the entirety of which is herein incorporated by reference). A second method hybridizes the sample to an array of oligonucleotide probes. An array consisting of oligonucleotides complementary to subsequences of a target sequence can be used to determine the identity of a target sequence, measure its amount, and detect differences between the target and a reference sequence. Nucleic acid molecules microarrays may also be screened with protein molecules or fragments thereof to determine nucleic acid molecules that specifically bind protein molecules or fragments thereof.

[0166] The microarray approach may be used with polypeptide targets (U.S. Pat. No. 5,445,934; U.S. Pat. No. 5,143,854; U.S. Pat. No. 5,079,600; U.S. Pat. No. 4,923,901, all of which are herein incorporated by reference in their entirety). Essentially, polypeptides are synthesized on a substrate (microarray) and these polypeptides can be screened with either protein molecules or fragments thereof or nucleic acid molecules in order to screen for either protein molecules or fragments thereof or nucleic acid molecules that specifically bind the target polypeptides. Implementation of these techniques rely on recently developed combinatorial technologies to generate any ordered array of a large number of oligonucleotide probes (Fodor et al., Science 251:767-773 (1991), the entirety of which is herein incorporated by reference).

[0167] It is understood that one or more of the molecules of the present invention, preferably one or more of the nucleic acid molecules or protein molecules or fragments thereof of the present invention may be utilized in a microarray based method.

[0168] In a preferred embodiment of the present invention microarrays may be prepared that comprise nucleic acid molecules where preferably at least 10%, preferably at least 25%, more preferably at least 50% and even more preferably at least 75%, 80%, 85%, 90% or 95% of the nucleic acid molecules located on that array are selected from the group of nucleic acid molecules that specifically hybridize to one or more nucleic acid molecule having a nucleic acid sequence selected from the group of SEQ ID NO: 1 through SEQ ID NO: 6167 or complement thereof or fragments of either.

[0169] A particular preferred microarray embodiment of the present invention is a microarray comprising nucleic acid molecules encoding genes or fragments thereof that are homologues of known genes or nucleic acid molecules that comprise genes or fragment thereof that elicit only limited or no matches to known genes. A further preferred microarray embodiment of the present invention is a microarray comprising nucleic acid molecules having genes or fragments thereof that are homologues of known genes and nucleic acid molecules that comprise genes or fragment thereof that elicit only limited or no matches to known genes. Site-directed mutagenesis may be utilized to modify nucleic acid sequences, particularly as it is a technique that allows one or more of the amino acids encoded by a nucleic acid molecule to be altered (e.g. a threonine to be replaced by a methionine). Three basic methods for site-directed mutagenesis are often employed. These are cassette mutagenesis (Wells et al., Gene 34:315-23 (1985), the entirety of which is herein incorporated by reference), primer extension (Gilliam et al., Gene 12:129-137 (1980), the entirety of which is herein incorporated by reference); Zoller and Smith, Methods Enzymol. 100:468-500 (1983), the entirety of which is herein incorporated by reference; and Dalbadie-McFarland et al., Proc. Natl. Acad. Sci. (U.S.A.) 79:6409-6413 (1982), the entirety of which is herein incorporated by reference) and methods based upon PCR (Scharf et al., Science 233:1076-1078 (1986), the entirety of which is herein incorporated by reference; Higuchi et al., Nucleic Acids Res. 16:7351-7367 (1988), the entirety of which is herein incorporated by reference). Site-directed mutagenesis approaches are also described in European Patent 0 385 962, the entirety of which is herein incorporated by reference, European Patent 0 359 472, the entirety of which is herein incorporated by reference, and PCT Patent Application WO 93/07278, the entirety of which is herein incorporated by reference.

[0170] Site-directed mutagenesis strategies have been applied to plants for both in vitro as well as in vivo site-directed mutagenesis (Lanz et al., J. Biol. Chem. 266:9971-6 (1991); Kovgan and Zhdanov, Biotekhnologiya 5:148-154; No. 207160n, Chemical Abstracts 110:225 (1989); Ge et al., Proc. Natl. Acad. Sci. (U.S.A.) 86:4037-4041 (1989); Zhu et al., J. Biol. Chem. 271:18494-18498 (1996); Chu et al., Biochemistry 33:6150-6157 (1994); Small et al., EMBO J. 11:1291-1296 (1992); Cho et al., Mol. Biotechnol. 8:13-16 (1997); Kita et al., J. Biol. Chem. 271:26529-26535 (1996); Jin et al., Mol. Microbiol. 7:555-562 (1993); Hatfield and Vierstra, J. Biol. Chem. 267:14799-14803 (1992); Zhao et al., Biochemistry 31:5093-5099 (1992), all of which are herein incorporated by reference in their entirety).

[0171] Any of the nucleic acid molecules of the present invention may either be modified by site-directed mutagenesis or used as, for example, nucleic acid molecules that are used to target other nucleic acid molecules for modification. It is understood that mutants with more than one altered nucleotide can be constructed using techniques that practitioners skilled in the art are familiar with such as isolating restriction fragments and ligating such fragments into an expression vector (see, for example, Sambrook et al., Molecular Cloning: A Laboratory Manual, Cold Spring Harbor Press (1989)).

[0172] Sequence-specific DNA-binding proteins play a role in the regulation of transcription. The isolation of recombinant cDNAs encoding these proteins facilitates the biochemical analysis of their structural and functional properties. Genes encoding such DNA-binding proteins have been isolated using classical genetics (Vollbrecht et al., Nature 350: 241-243 (1991), the entirety of which is herein incorporated by reference) and molecular biochemical approaches, including the screening of recombinant cDNA libraries with antibodies (Landschulz et al., Genes Dev. 2: 786-800 (1988), the entirety of which is herein incorporated by reference) or DNA probes (Bodner et al., Cell 55: 505-518 (1988), the entirety of which is herein incorporated by reference). In addition, an in situ screening procedure has been used and has facilitated the isolation of sequence-specific DNA-binding proteins from various plant species (Gilmartin et al., Plant Cell 4: 839-849 (1992); Schindler et al., EMBO J. 11: 1261-1273 (1992), both of which are herein incorporated by reference in their entirety). An in situ screening protocol does not require the purification of the protein of interest (Vinson et al., Genes Dev. 2: 801-806 (1988); Singh et al., Cell 52: 415-423 (1988), both of which are herein incorporated by reference in their entirety).

[0173] Steps may be employed to characterize DNA-protein interactions. The first is to identify promoter fragments that interact with DNA-binding proteins, to titrate binding activity, to determine the specificity of binding, and to determine whether a given DNA-binding activity can interact with related DNA sequences (Sambrook et al., Molecular Cloning: A Laboratory Manual, 2^{nd} edition. Cold Spring Harbor Laboratory Press, Cold Spring Harbor, N.Y. (1989). Electrophoretic mobility-shift assay is a widely used assay. The assay provides a simple, rapid, and sensitive method for detecting DNA-binding proteins based on the observation that the mobility of a DNA fragment through a nondenaturing, low-ionic strength polyacrylamide gel is retarded upon association with a DNA-binding protein (Fried and Crother, Nucleic Acids Res. 9: 6505-6525 (1981), the entirety of which is herein incorporated by reference). When one or more specific binding activities have been identified, the exact sequence of the DNA bound by the protein may be determined. Several procedures for characterizing protein/DNA-binding sites are used, including methylation and ethylation interference assays (Maxam and Gilbert, Methods Enzymol. 65: 499-560 (1980); Wissman and Hillen, Methods Enzymol. 208: 365-379 (1991), both of which are herein incorporated by reference in their entirety) and footprinting techniques employing DNase I (Galas and Schmitz, Nucleic Acids Res. 5: 3157-3170 (1978), herein incorporated by reference in its entirety), 1,10-phenanthroline-copper ion methods (Sigman et al., Methods Enzymol. 208: 365-379 (1991), herein incorporated by reference in its entirety) or hydroxyl radical methods (Dixon et al., Methods Enzymol. 208: 380-413 (1991), herein incorporated by reference in its entirety). It is understood that one or more of the nucleic acid molecules of the present invention, preferably one or more of the EST nucleic acid molecules of the present invention may be utilized to identify a protein or fragment thereof that specifically binds to a nucleic acid molecule of the present invention. It is also understood that one or more of the protein molecules or fragments thereof of the present invention may be utilized to identify a nucleic acid molecule that specifically binds to it.

[0174] The two-hybrid system is based on the fact that many cellular functions are carried out by proteins that interact (physically) with one another. Two-hybrid systems have been used to probe the function of new proteins (Chien et al., Proc. Natl. Acad. Sci. (U.S.A.) 88: 9578-9582 (1991); Durfee et al., Genes Dev. 7: 555-569 (1993); Choi et al., Cell 78: 499-512 (1994); Kranz et al., Genes Dev. 8: 313-327 (1994), all of which are herein incorporated by reference in their entirety).

[0175] Interaction mating techniques have facilitated a number of two-hybrid studies of protein-protein interaction. Interaction mating has been used to examine interactions between small sets of tens of proteins (Finley and Brent, Proc. Natl. Acad Sci. (U.S.A.) 91: 12098-12984 (1994), herein incorporated by reference in its entirety), larger sets of hundreds of proteins, (Bendixen et al., Nucl. Acids Res. 22: 1778-1779 (1994), herein incorporated by reference in its entirety) and to comprehensively map proteins encoded by a small genome (Bartel et al., Nature Genetics 12: 72-77 (1996), herein incorporated by reference in its entirety). This technique utilizes proteins fused to the DNA-binding domain and proteins fused to the activation domain. They are expressed in two different haploid yeast stains of opposite mating type, and the strains are mated to determine if the two proteins interact. Mating occurs when haploid yeast strains come into contact and result in the fusion of the two haploids into a diploid yeast strain. An interaction can be determined by the activation of a two-hybrid reporter gene in the diploid strain. The primary advantage of this technique is that it reduces the number of yeast transformations needed to test individual interactions. It is understood that the protein-protein interactions of protein or fragments thereof of the present invention may be investigated using the two-hybrid system and that any of the nucleic acid molecules of the present invention that encode such proteins or fragments thereof may be used to transform yeast in the two-hybrid system.

[0176] Synechocystis 6803 is a photosynthetic Cyanobacterium capable of oxygenic photosynthesis as well as heterotrophic growth in the absence of light. The entire genome has been sequenced, and it is reported to have a circular genome size of 3.57 Mbp containing 3168 potential open reading frames. Open reading frames (ORFs) were identified based upon their homology to other reported ORFs and by using ORF identification computer programs. Sixteen hundred potential ORFs were assigned based on their homology to previously identified ORFs. Of these 1600 ORFs, 145 were identical to reported ORFs (Kaneko et al., DNA Research 3:109-36 (1996), herein incorporated by reference in its entirety).

[0177] Several prokaryote promoters have been used in Synechocystis to express heterologous genes including the tac, lac, and lambda phage promoters (Bryant (ed.), The Molecular Biology of Cyanobacteria, Kluwer Academic Publishers, (1994); Ferino and Chauvat, Gene 84:257-266 (1989), both of which are herein incorporated by reference in their entirety). Several bacterial origins of replication such as RSF1010 and ACYC are reported to replicate in Synechocystis (Mermet-Bouvier and Chauvat, Current Microbiology 28:145-148 (1994); Kuhlemeier et al., Mol. Gen. Genet. 184:249-254 (1981), both of which are herein incorporated by reference in their entirety).

[0178] Synechocystis has been used to study gene regulation by gene replacement through homologous recombination or by gene disruption using antibiotic resistance markers (Pakrasi et al., EMBO 7:325-332 (1988), herein incorporated by reference in its entirety). In such gene regulation studies, double reciprocal homologous regions of the host genome flanking the gene of interest recombine to stably integrate the gene of interest into the genome. The gene of interest can be expressed once that gene has been stably integrated into the genome. Biochemical analysis can be performed to study the effect of the replaced or deleted gene.

[0179] It is understood that the agents of the present invention may be employed in a Synechocystis system.

[0180] Exogenous genetic material may be transferred into a plant cell and the plant cell regenerated into a whole, fertile or sterile plant Exogenous genetic material is any genetic material, whether naturally occurring or otherwise, from any source that is capable of being inserted into any organism. Such genetic material may be transferred into either monocotyledons and dicotyledons including but not limited to the crops, maize and soybean (See specifically, Chistou, Particle Bombardmentfor Genetic Engineering of Plants, pp 63-69 (maize), pp 50-60 (soybean), Biotechnology Intelligence Unit. Academic Press, San Diego, Calif. (1996), the entirety of which is herein incorporated by reference and generally Chistou, Particle Bombardmentfor Genetic Engineering of Plants, Biotechnology Intelligence Unit. Academic Press, San Diego, Calif. (1996), the entirety of which is herein incorporated by reference).

[0181] Transfer of a nucleic acid that encodes for a protein can result in overexpression of that protein in a transformed cell or transgenic plant. One or more of the proteins or fragments thereof encoded by nucleic acid molecules of the present invention may be overexpressed in a transformed cell or transformed plant. Such overexpression may be the result of transient or stable transfer of the exogenous material.

[0182] Exogenous genetic material may be transferred into a plant cell by the use of a DNA vector or construct designed for such a purpose. Design of such a vector is generally within the skill of the art (See, Plant Molecular Biology: A Laboratory Manual eds. Clark, Springer, New York (1997), herein incorporated by reference in its entirety).

[0183] A construct or vector may include a plant promoter to express the protein or protein fragment of choice. A number of promoters which are active in plant cells have been described in the literature. These include the nopaline synthase (NOS) promoter (Ebert et al., Proc. Natl. Acad. Sci. (U.S.A.) 84:5745-5749 (1987), herein incorporated by reference in its entirety), the octopine synthase (OCS) promoter (which are carried on tumor-inducing plasmids of Agrobacterium tumefaciens), the caulimovirus promoters such as the cauliflower mosaic virus (CaMV) 19S promoter (Lawton et al., Plant Mol. Biol. 9:315-324 (1987), herein incorporated by reference in its entirety) and the CAMV 35S promoter (Odell et al., Nature 313:810-812 (1985), herein incorporated by reference in its entirety), the figwort mosaic virus 35S-promoter, the light-inducible promoter from the small subunit of ribulose-1,5-bis-phosphate carboxylase (ssRUBISCO), the Adh promoter (Walker et al., Proc. Natl. Acad. Sci. (U.S.A.) 84:6624-6628 (1987), herein incorporated by reference in its entirety), the sucrose synthase promoter (Yang et al., Proc. Natl. Acad. Sci. (U.S.A.) 87:4144-4148 (1990), herein incorporated by reference in its entirety), the R gene complex promoter (Chandler et al., The Plant Cell 1: 1175-1183 (1989), herein incorporated by reference in its entirety), and the chlorophyll a/b binding protein gene promoter, etc. These promoters have been used to create DNA constructs which have been expressed in plants; see, e.g., PCT publication WO 84/02913, herein incorporated by reference in its entirety.

[0184] Promoters which are known or are found to cause transcription of DNA in plant cells can be used in the present invention. Such promoters may be obtained from a variety of sources such as plants and plant viruses. It is preferred that the particular promoter selected should be capable of causing sufficient expression to result in the production of an effective amount of a protein to cause the desired phenotype. In addition to promoters which are known to cause transcription of DNA in plant cells, other promoters may be identified for use in the current invention by screening a plant cDNA library for genes which are selectively or preferably expressed in the target tissues or cells.

[0185] For the purpose of expression in source tissues of the plant, such as the leaf, seed, root or stem, it is preferred that the promoters utilized in the present invention have relatively high expression in these specific tissues. For this purpose, one may choose from a number of promoters for genes with tissue- or cell-specific or -enhanced expression. Examples of such promoters reported in the literature include the chloroplast glutamine synthetase GS2 promoter from pea (Edwards et al., Proc. Natl. Acad. Sci. (U.S.A.) 87:3459-3463 (1990), herein incorporated by reference in its entirety), the chloroplast fructose-1,6-biphosphatase (FBPase) promoter from wheat (Lloyd et al., Mol. Gen. Genet. 225:209-216 (1991), herein incorporated by reference in its entirety), the nuclear photosynthetic ST-LS1 promoter from potato (Stockhaus et al., EMBO J. 8:2445-2451 (1989), herein incorporated by reference in its entirety), the phenylalanine ammonia-lyase (PAL) promoter and the chalcone synthase (CHS) promoter from Arabidopsis thaliana. Also reported to be active in photosynthetically active tissues are the ribulose-1,5-bisphosphate carboxylase (RbcS) promoter from eastern larch (Larix laricina), the promoter for the cab gene, cab6, from pine (Yamamoto et al., Plant Cell Physiol. 35:773-778 (1994), herein incorporated by reference in its entirety), the promoter for the Cab-1 gene from wheat (Fejes et al., Plant Mol. Biol. 15:921-932 (1990), herein incorporated by reference in its entirety), the promoter for the CAB-1 gene from spinach (Lubberstedt et al., Plant Physiol. 104:997-1006 (1994), herein incorporated by reference in its entirety), the promoter for the cab1R gene from rice (Luan et al., Plant Cell. 4:971-981 (1992), herein incorporated by reference in its entirety), the pyruvate, orthophosphate dikinase (PPDK) promoter from maize (Matsuoka et al., Proc. Natl. Acad. Sci. (U.S.A.) 90: 9586-9590 (1993), herein incorporated by reference in its entirety), the promoter for the tobacco Lhcbl*2 gene (Cerdan et al., Plant Mol. Biol. 33:245-255. (1997), herein incorporated by reference in its entirety), the Arabidopsis thaliana SUC2 sucrose-H+ symporter promoter (Truernit et al., Planta. 196: 564-570 (1995), herein incorporated by reference in its entirety), and the promoter for the thylacoid membrane proteins from spinach (psaD, psaF, psaE, PC, FNR, atpC, atpD, cab, rbcS). Other promoters for the chlorophyl a/b-binding proteins may also be utilized in the present invention, such as the promoters for LhcB gene and PsbP gene from white mustard (Sinapis alba; Kretsch et al., Plant Mol. Biol. 28: 219-229 (1995), herein incorporated by reference in its entirety).

[0186] For the purpose of expression in sink tissues of the plant, such as the tuber of the potato plant, the fruit of tomato, or the seed of maize, wheat, rice, and barley, it is preferred that the promoters utilized in the present invention have relatively high expression in these specific tissues. A number of promoters for genes with tuber-specific or -enhanced expression are known, including the class I patatin promoter (Bevan et al., EMBO J. 8: 1899-1906 (1986); Jefferson et al., Plant Mol. Biol. 14: 995-1006 (1990), both of which are herein incorporated by reference in their entirety), the promoter for the potato tuber ADPGPP genes, both the large and small subunits, the sucrose synthase promoter (Salanoubat and Belliard, Gene. 60: 47-56 (1987), Salanoubat and Belliard, Gene. 84: 181-185 (1989), both of which are incorporated by reference in their entirety), the promoter for the major tuber proteins including the 22 kd protein complexes and proteinase inhibitors (Hannapel, Plant Physiol. 101: 703-704 (1993), herein incorporated by reference in its entirety), the promoter for the granule bound starch synthase gene (GBSS) (Visser et al., Plant Mol. Biol. 17: 691-699 (1991), herein incorporated by reference in its entirety), and other class I and II patatins promoters (Koster-Topfer et al., Mol Gen Genet. 219: 390-396 (1989); Mignery et al., Gene. 62: 27-44 (1988), both of which are herein incorporated by reference in their entirety).

[0187] Other promoters can also be used to express a fructose 1,6 bisphosphate aldolase gene in specific tissues, such as seeds or fruits. The promoter for β-conglycinin (Chen et al., Dev. Genet. 10: 112-122 (1989), herein incorporated by reference in its entirety) or other seed-specific promoters such as the napin and phaseolin promoters, can be used. The zeins are a group of storage proteins found in maize endosperm. Genomic clones for zein genes have been isolated (Pedersen et al., Cell 29: 1015-1026 (1982), herein incorporated by reference in its entierty), and the promoters from these clones, including the 15 kD, 16 kD, 19 kD, 22 kD, 27 kD, and gamma genes, could also be used. Other promoters known to function, for example, in maize, include the promoters for the following genes: waxy, Brittle, Shrunken 2, Branching enzymes I and II, starch synthases, debranching enzymes, oleosins, glutelins, and sucrose synthases. A particularly preferred promoter for maize endosperm expression is the promoter for the glutelin gene from rice, more particularly the Osgt-1 promoter (Zheng et al., Mol. Cell Biol. 13: 5829-5842 (1993), herein incorporated by reference in its entirety). Examples of promoters suitable for expression in wheat include those promoters for the ADPglucose pyrophosphorylase (ADPGPP) subunits, the granule bound and other starch synthases, the branching and debranching enzymes, the embryogenesis-abundant proteins, the gliadins, and the glutenins. Examples of such promoters in rice include those promoters for the ADPGPP subunits, the granule bound and other starch synthases, the branching enzymes, the debranching enzymes, sucrose synthases, and the glutelins. A particularly preferred promoter is the promoter for rice glutelin, Osgt-1. Examples of such promoters for barley include those for the ADPGPP subunits, the granule bound and other starch synthases, the branching enzymes, the debranching enzymes, sucrose synthases, the hordeins, the embryo globulins, and the aleurone specific proteins.

[0188] Root specific promoters may also be used. An example of such a promoter is the promoter for the acid chitinase gene (Samac et al., Plant Mol. Biol. 25: 587-596 (1994), herein incorporated by reference in its entirety). Expression in root tissue could also be accomplished by utilizing the root specific subdomains of the CaMV35S promoter that have been identified (Lam et al., Proc. Natl. Acad. Sci. (U.S.A.) 86:7890-7894 (1989), herein incorporated by reference in its entirety). Other root cell specific promoters include those reported by Conkling et al. (Conkling et al., Plant Physiol. 93:1203-1211 (1990), herein incorporated by reference in its entirety).

[0189] Additional promoters that may be utilized are described, for example, in U.S. Pat. Nos. 5,378,619, 5,391,725, 5,428,147, 5,447,858, 5,608,144, 5,608,144, 5,614,399, 5,633,441, 5,633,435, and 4,633,436, all of which are herein incorporated in their entirety. In addition, a tissue specific enhancer may be used (Fromm et al., The Plant Cell 1:977-984 (1989), herein incorporated by reference in its entirety).

[0190] Constructs or vectors may also include, with the coding region of interest, a nucleic acid sequence that acts, in whole or in part, to terminate transcription of that region. For example, such sequences have been isolated including the Tr7 3′ sequence and the nos 3′ sequence (Ingelbrecht et al., The Plant Cell 1:671-680 (1989); Bevan et al., Nucleic Acids Res. 11:369-385 (1983), all of which are herein incorporated by reference in their entirety), or the like.

[0191] A vector or construct may also include regulatory elements. Examples of such include the Adh intron 1 (Callis et al., Genes and Develop. 1:1183-1200 (1987), herein incorporated by reference in its entirety), the sucrose synthase intron (Vasil et al., Plant Physiol. 91:1575-1579 (1989), herein incorporated by reference in its entirety) and the TMV omega element (Gallie et al., The Plant Cell 1:301-311 (1989), herein incorporated by reference in its entirety). These and other regulatory elements may be included when appropriate.

[0192] A vector or construct may also include a selectable marker. Selectable markers may also be used to select for plants or plant cells that contain the exogenous genetic material. Examples of such include, but are not limited to, a neo gene (Potrykus et al., Mol. Gen. Genet. 199:183-188 (1985), herein incorporated by reference in its entirety) which codes for kanamycin resistance and can be selected for using kanamycin, G418, etc.; a bar gene which codes for bialaphos resistance; a mutant EPSP synthase gene (Hinchee et al., Bio/Technology 6:915-922 (1988), herein incorporated by reference in its entirety) which encodes glyphosate resistance; a nitrilase gene which confers resistance to bromoxynil (Stalker et al., J. Biol. Chem. 263:6310-6314 (1988), herein incorporated by reference in its entirety); a mutant acetolactate synthase gene (ALS) which confers imidazolinone or sulphonylurea resistance (European Patent Application 154,204 (Sep. 11, 1985), herein incorporated by reference in its entirety); and a methotrexate resistant DHFR gene (Thillet et al., J. Biol. Chem. 263:12500-12508 (1988), herein incorporated by reference in its entirety).

[0193] A vector or construct may also include a transit peptide. Incorporation of a suitable chloroplast transit peptide may also be employed (European Patent Application Publication Number 0218571, herein incorporated by reference in its entirety). Translational enhancers may also be incorporated as part of the vector DNA. DNA constructs could contain one or more 5′ non-translated leader sequences which may serve to enhance expression of the gene products from the resulting mRNA transcripts. Such sequences may be derived from the promoter selected to express the gene or can be specifically modified to increase translation of the mRNA. Such regions may also be obtained from viral RNAs, from suitable eukaryotic genes, or from a synthetic gene sequence. For a review of optimizing expression of transgenes, see Koziel et al., Plant Mol. Biol. 32:393-405 (1996), herein incorporated by reference in its entirety.

[0194] A vector or construct may also include a screenable marker. Screenable markers may be used to monitor expression. Exemplary screenable markers include a β-glucuronidase or uidA gene (GUS) which encodes an enzyme for which various chromogenic substrates are known (Jefferson, Plant Mol. Biol, Rep. 5: 387-405 (1987); Jefferson et al., EMBO J. 6: 3901-3907 (1987), both of which are herein incorporated by reference in their entirety); an R-locus gene, which encodes a product that regulates the production of anthocyanin pigments (red color) in plant tissues ((Dellaporta et al., Stadler Symposium 11:263-282 (1988), herein incorporated by reference in its entirety); a β-lactamase gene (Sutcliffe et al., Proc. Natl. Acad. Sci. (U.S.A.) 75: 3737-3741 (1978), herein incorporated by reference in its entirety), a gene which encodes an enzyme for which various chromogenic substrates are known (e.g., PADAC, a chromogenic cephalosporin); a luciferase gene (Ow et al., Science 234: 856-859 (1986), herein incorporated by reference in its entirety) a xylE gene (Zukowsky et al., Proc. Natl. Acad. Sci. (U.S.A.) 80:1101-1105 (1983), herein incorporated by reference in its entirety) which encodes a catechol diozygenase that can convert chromogenic catechols; an α-amylase gene (Ikatu et al., Bio/Technol. 8:241-242 (1990), herein incorporated by reference in its entirety); a tyrosinase gene (Katz et al., J. Gen Microbiol. 129:2703-2714 (1983), herein incorporated by reference in its entirety) which encodes an enzyme capable of oxidizing tyrosine to DOPA and dopaquinone which in turn condenses to melanin; an α-galactosidase, which will turn a chromogenic α-galactose substrate.

[0195] Included within the terms “selectable or screenable marker genes” are also genes which encode a scriptable marker whose secretion can be detected as a means of identifying or selecting for transformed cells. Examples include markers which encode a secretable antigen that can be identified by antibody interaction, or even secretable enzymes which can be detected catalytically. Secretable proteins fall into a number of classes, including small, diffusible proteins detectable, e.g., by ELISA, small active enzymes detectable in extracellular solution (e.g., α-amylase, β-lactamase, phosphinothricin transferase), or proteins which are inserted or trapped in the cell wall (such as proteins which include a leader sequence such as that found in the expression unit of extension or tobacco PR-S). Other possible selectable and/or screenable marker genes will be apparent to those of skill in the art.

[0196] Methods and compositions for transforming a bacteria and other microorganisms are known in the art (see for example Sambrook et al., Molecular Cloning: A Laboratory Manual, Second Edition, Cold Spring Harbor Laboratory Press, Cold Spring Harbor, N.Y., (1989), the entirety of which is herein incorporated by reference).

[0197] There are many methods for introducing transforming nucleic acid molecules into plant cells. Suitable methods are believed to include virtually any method by which nucleic acid molecules may be introduced into a cell, such as by Agrobacterium infection or direct delivery of nucleic acid molecules such as, for example, by PEG-mediated transformation, by electroporation or by acceleration of DNA coated particles, etc. (Pottykus, Ann. Rev. Plant Physiol. Plant Mol. Biol. 42:205-225 (1991); Vasil, Plant Mol. Biol. 25: 925-937 (1994), both of which are herein incorporated by reference in their entirety). For example, electroporation has been used to transform maize protoplasts (Fromm et al., Nature 312:791-793 (1986), herein incorporated by reference in its entirety).

[0198] Other vector systems suitable for introducing transforming DNA into a host plant cell includes but is not limited to binary artificial chromosome (BIBAC) vectors (Hamilton et al., Gene 200:107-116, (1997), herein incorporated by reference in its entirety, and transfection with RNA viral vectors (Della-Cioppa et al., Ann. N.Y. Acad. Sci. (1996), 792 (Engineering Plants for Commercial Products and Applications), 57-61, the entirety of which is herein incorporated by reference.

[0199] Technology for introduction of DNA into cells is well known to those of skill in the art Four general methods for delivering a gene into cells have been described: (1) chemical methods (Graham and van der Eb, Virology, 54:536-539 (1973), the entirety of which is herein incorporated by reference); (2) physical methods such as microinjection (Capecchi, Cell 22:479-488 (1980), electroporation (Wong and Neumann, Biochem. Biophys. Res. Commun., 107:584-587 (1982); Fromm et al., Proc. Natl. Acad. Sci. USA, 82:5824-5828 (1985); U.S. Pat. No. 5,384,253; and the gene gun (Johnston and Tang, Methods Cell Biol. 43:353-365 (1994), all of which the entirety is herein incorporated by reference; (3) viral vectors (Clapp, Clin. Perinatol., 20:155-168 (1993); Lu et al, J. Exp. Med, 178:2089-2096 (1993); Eglitis and Anderson, Biotechniques, 6:608-614 (1988), all of which the entirety is herein incorporated by reference); and (4) receptor-mediated mechanisms (Curiel et al., Hum. Gen. Ther., 3:147-154 (1992); Wagner et al., Proc. Natl. Acad. Sci. USA, 89:6099-6103 (1992), all of which the entirety is herein incorporated by reference).

[0200] Acceleration methods that may be used include, for example, microprojectile bombardment and the like. One example of a method for delivering transforming nucleic acid molecules to plant cells is microprojectile bombardment. This method has been reviewed by Yang and Christou, eds., Particle Bombardment Technology for Gene Transfer, Oxford Press, Oxford, England (1994), the entirety of which is herein incorporated by reference). Non-biological particles (microprojectiles) that may be coated with nucleic acids and delivered into cells by a propelling force. Exemplary particles include those comprised of tungsten, gold, platinum, and the like.

[0201] A particular advantage of microprojectile bombardment, in addition to it being an effective means of reproducibly, and stably transforming monocotyledons, is that neither the isolation of protoplasts (Cristou et al., Plant Physiol. 87:671-674 (1988), herein incorporated by reference in its entirety) nor the susceptibility of Agrobacterium infection is required. An illustrative embodiment of a method for delivering DNA into maize cells by acceleration is a biolistics g-particle delivery system, which can be used to propel particles coated with DNA through a screen, such as a stainless steel or Nytex screen, onto a filter surface covered with corn cells cultured in suspension. Gordon-Kamm et al., describes the basic procedure for coating tungsten particles with DNA (Gordon-Kamm et al., Plant Cell 2: 603-618 (1990), herein incorporated by reference in its entirety). The screen disperses the tungsten nucleic acid particles so that they are not delivered to the recipient cells in large aggregates. A particle delivery system suitable for use with the present invention is the helium acceleration PDS-1000/He gun which is available from Bio-Rad Laboratories (Bio-Rad, Hercules, Calif.)(Sanford et al., Technique 3:3-16 (1991), herein incorporated by reference in its entirety).

[0202] For the bombardment, cells in suspension may be concentrated on filters. Filters containing the cells to be bombarded are positioned at an appropriate distance below the microprojectile stopping plate. If desired, one or more screens are also positioned between the gun and the cells to be bombarded.

[0203] Alternatively, immature embryos or other target cells may be arranged on solid culture medium. The cells to be bombarded are positioned at an appropriate distance below the macroprojectile stopping plate. If desired, one or more screens are also positioned between the acceleration device and the cells to be bombarded. Through the use of techniques set forth herein one may obtain up to 1000 or more foci of cells transiently expressing a marker gene. The number of cells in a focus which express the exogenous gene product 48 hours post-bombardment often range from one to ten and average one to three.

[0204] In bombardment transformation, one may optimize the prebombardment culturing conditions and the bombardment parameters to yield the maximum numbers of stable transformants. Both the physical and biological parameters for bombardment are important in this technology. Physical factors are those that involve manipulating the DNA/microprojectile precipitate or those that affect the flight and velocity of either the macro- or microprojectiles. Biological factors include all steps involved in manipulation of cells before and immediately after bombardment, the osmotic adjustment of target cells to help alleviate the trauma associated with bombardment, and also the nature of the transforming DNA, such as linearized DNA or intact supercoiled plasmids. It is believed that pre-bombardment manipulations are especially important for successful transformation of immature embryos. In another alternative embodiment, plastids can be stably transformed. Methods disclosed for plastid transformation in higher plants include the particle gun delivery of DNA containing a selectable marker and targeting of the DNA to the plastid genome through homologous recombination (Svab et al., Proc. Natl. Acad Sci. (U.S.A.) 87:8526-8530 (1990); Svab and Maliga, Proc. Natl. Acad. Sci. (U.S.A.) 90:913-917 (1993); Staub and Maliga, EMBO J. 12:601-606 (1993); U.S. Pat. Nos. 5,451,513 and 5,545,818, all of which are herein incorporated by reference in their entirety).

[0205] Accordingly, it is contemplated that one may wish to adjust various aspects of the bombardment parameters in small scale studies to fully optimize the conditions. One may particularly wish to adjust physical parameters such as gap distance, flight distance, tissue distance, and helium pressure. One may also minimize the trauma reduction factors by modifying conditions which influence the physiological state of the recipient cells and which may therefore influence transformation and integration efficiencies. For example, the osmotic state, tissue hydration and the subculture stage or cell cycle of the recipient cells may be adjusted for optimum transformation. The execution of other routine adjustments will be known to those of skill in the art in light of the present disclosure.

[0206] Agrobacterium-mediated transfer is a widely applicable system for introducing genes into plant cells because the DNA can be introduced into whole plant tissues, thereby bypassing the need for regeneration of an intact plant from a protoplast. The use of Agrobacterium-mediated plant integrating vectors to introduce DNA into plant cells is well known in the art. See, for example the methods described (Fraley et al., Biotechnology 3:629-635 (1985); Rogers et al., Meth. In Enzymol, 153:253-277 (1987), both of which are herein incorporated by reference in their entirety. Further, the integration of the Ti-DNA is a relatively precise process resulting in few rearrangements. The region of DNA to be transferred is defined by the border sequences, and intervening DNA is usually inserted into the plant genome as described (Spielmann et al., Mol. Gen. Genet., 205:34 (1986), the entirety of which is herein incorporated by reference).

[0207] Modern Agrobacterium transformation vectors are capable of replication in E. coli as well as Agrobacterium, allowing for convenient manipulations as described (Klee et al., In: Plant DNA Infectious Agents, T. Hohn and J. Schell, eds., Springer-Verlag, New York, pp. 179-203 (1985), the entirety of which is herein incorporated by reference. Moreover, recent technological advances in vectors for Agrobacterium-mediated gene transfer have improved the arrangement of genes and restriction sites in the vectors to facilitate construction of vectors capable of expressing various polypeptide coding genes. The vectors described have convenient multi-linker regions flanked by a promoter and a polyadenylation site for direct expression of inserted polypeptide coding genes and are suitable for present purposes (Rogers et al., Meth. In Enzymol., 153:253-277 (1987), the entirety of which is herein incorporated by reference). In addition, Agrobacterium containing both armed and disarmed Ti genes can be used for the transformations. In those plant strains where Agrobacterium-mediated transformation is efficient, it is the method of choice because of the facile and defined nature of the gene transfer.

[0208] A transgenic plant formed using Agrobacterium transformation methods typically contains a single gene on one chromosome. Such transgenic plants can be referred to as being heterozygous for the added gene. More preferred is a transgenic plant that is homozygous for the added structural gene; i.e., a transgenic plant that contains two added genes, one gene at the same locus on each chromosome of a chromosome pair. A homozygous transgenic plant can be obtained by sexually mating (selfing) an independent segregant transgenic plant that contains a single added gene, germinating some of the seed produced and analyzing the resulting plants produced for the gene of interest.

[0209] It is also to be understood that two different transgenic plants can also be mated to produce offspring that contain two independently segregating added, exogenous genes. Selfing of appropriate progeny can produce plants that are homozygous for both added, exogenous genes that encode a polypeptide of interest. Back-crossing to a parental plant and out-crossing with a non-transgenic plant are also contemplated, as is vegetative propagation.

[0210] Transformation of plant protoplasts can be achieved using methods based on calcium phosphate precipitation, polyethylene glycol treatment, electroporation, and combinations of these treatments. See for example (Potrykus et al., Mol. Gen. Genet., 205:193-200 (1986); Lorz et al., Mol. Gen. Genet., 199:178, (1985); Fromm et al., Nature, 319:791, (1986); Uchimiya et al., Mol. Gen. Genet. 204:204, (1986); Callis et al., Genes and Development, 1183, (1987); Marcotte et al., Nature, 335:454, (1988), all of which are herein incorporated by reference in their entirety).

[0211] Application of these systems to different plant strains depends upon the ability to regenerate that particular plant strain from protoplasts. Illustrative methods for the regeneration of cereals from protoplasts are described (Fujimura et al., Plant Tissue Culture Letters, 2:74, (1985); Toriyama et al., Theor Appl. Genet. 205:34. (1986); Yamada et al., Plant Cell Rep., 4:85, (1986); Abdullah et al., Biotechnology, 4:1087, (1986), all of which are herein incorporated by reference in their entirety).

[0212] To transform plant strains that cannot be successfully regenerated from protoplasts, other ways to introduce DNA into intact cells or tissues can be utilized. For example, regeneration of cereals from immature embryos or explants can be effected as described (Vasil, Biotechnology, 6:397, (1988), herein incorporated by reference in its entirety). In addition, “particle gun” or high-velocity microprojectile technology can be utilized (Vasil et al., Bio/Technology 10:667, (1992), herein incorporated by reference in its entirety).

[0213] Using the latter technology, DNA is carried through the cell wall and into the cytoplasm on the surface of small metal particles as described (Klein et al., Nature, 328:70, (1987); Klein et al., Proc. Natl. Acad. Sci. USA, 85:8502-8505, (1988); McCabe et al., Biotechnology, 6:923, (1988), all of which are herein incorporated by reference in their entirety). The metal particles penetrate through several layers of cells and thus allow the transformation of cells within tissue explants.

[0214] Other methods of cell transformation can also be used and include but are not limited to introduction of DNA into plants by direct DNA transfer into pollen (Hess et al., Intern Rev. Cytol., 107:367, (1987); Luo et al., Plant Mol. Biol. Reporter, 6:165, (1988), all of which are herein incorporated by reference in their entirety), by direct injection of DNA into reproductive organs of a plant (Pena et al., Nature, 325:274, (1987), herein incorporated by reference in its entirety), or by direct injection of DNA into the cells of inmature embryos followed by the rehydration of dessicated embryos (Neuhaus et al., Theor. Appl. Genet., 75:30, (1987), herein incorporated by reference in its entirety).

[0215] The regeneration, development, and cultivation of plants from single plant protoplast transformants or from various transformed explants is well known in the art (Weissbach and Weissbach, In: Methods for Plant Molecular Biology, (Eds.), Academic Press, Inc. San Diego, Calif., (1988), herein incorporated by reference in its entirety). This regeneration and growth process typically includes the steps of selection of transformed cells, culturing those individualized cells through the usual stages of embryonic development through the rooted plantlet stage. Transgenic embryos and seeds are similarly regenerated. The resulting transgenic rooted shoots are thereafter planted in an appropriate plant growth medium such as soil.

[0216] The development or regeneration of plants containing the foreign, exogenous gene that encodes a protein of interest is well known in the art. Preferably, the regenerated plants are self-pollinated to provide homozygous transgenic plants, as discussed before. Otherwise, pollen obtained from the regenerated plants is crossed to seed-grown plants of agronomically important lines. Conversely, pollen from plants of these important lines is used to pollinate regenerated plants. A transgenic plant of the present invention containing a desired polypeptide is cultivated using methods well known to one skilled in the art.

[0217] There are a variety of methods for the regeneration of plants from plant tissue. The particular method of regeneration will depend on the starting plant tissue and the particular plant species to be regenerated.

[0218] Methods for transforming dicots, primarily by use of Agrobacterium tumefaciens, and obtaining transgenic plants have been published for cotton (U.S. Pat. No. 5,004,863, U.S. Pat. No. 5,159,135, U.S. Pat. No. 5,518,908, all of which herein incorporated by reference in their entirety); soybean (U.S. Pat. No. 5,569,834, U.S. Pat. No. 5,416,011, McCabe et al., Biotechnology 6:923, (1988), Christou et al., Plant Physiol., 87:671-674 (1988), all of which are herein incorporated by reference in their entirety); Brassica (U.S. Pat. No. 5,463,174, herein incorporated by reference in its entirety); peanut (Cheng et al., Plant Cell Rep. 15: 653-657 (1996); McKently et al., Plant Cell Rep. 14:699-703 (1995), all of which are herein incorporated by reference in their entirety); papaya (Yang et al., (1996), herein incorporated by reference in its entirety); pea (Grant et al., Plant Cell Rep. 15:254-258, (1995), herein incorporated by reference in its entirety).

[0219] Transformation of monocotyledons using electroporation, particle bombardment, and Agrobacterium have also been reported. Transformation and plant regeneration have been achieved in asparagus (Bytebier et al., Proc. Natl. Acad. Sci. USA 84:5345, (1987), herein incorporated by reference in its entirety); barley (Wan and Lemaux, Plant Physiol 104:37, (1994), herein incorporated by reference in its entirety); maize (Rhodes et al., Science 240: 204, (1988), Gordon-Kamm et al., Plant Cell, 2:603, (1990), Fromm et al., Bio/Technology 8:833, (1990), Koziel et al., Bio/Technology 11:194, (1993), Armstrong et al., Crop Science 35:550-557, (1995), all of which are herein incorporated by reference in their entirety); oat (Somers et al., Bio/Technology, 10:1589, (1992), herein incorporated by reference in its entirety); orchardgrass (Horn et al., Plant Cell Rep. 7:469, (1988), herein incorporated by reference in its entirety); rice (Toriyama et al., Theor Appl. Genet. 205:34, (1986); Park et al., Plant Mol. Biol., 32: 1135-1148, (1996); Abedinia et al., Aust. J. Plant Physiol. 24:133-141, (1997); Zhang and Wu, Theor. Appl. Genet. 76:835, (1988); Zhang et al. Plant Cell Rep. 7:379, (1988); Battraw and Hall, Plant Sci. 86:191-202, (1992); Christou et al., Bio/Technology 9:957, (1991), all of which are herein incorporated by reference in their entirety); sugarcane (Bower and Birch, Plant J. 2:409, (1992), herein incorporated by reference in its entirety); tall fescue (Wang et al., Bio/Technology 10:691, (1992), herein incorporated by reference in its entirety), and wheat (Vasil et al., Bio/Technology 10:667, (1992); U.S. Pat. No. 5,631,152, both of which are herein incorporated by reference in their entirety).

[0220] Assays for gene expression based on the transient expression of cloned nucleic acid constructs have been developed by introducing the nucleic acid molecules into plant cells by polyethylene glycol treatment, electroporation, or particle bombardment (Marcotte, et al., Nature, 335: 454-457 (1988); Marcotte, et al., Plant Cell, 1: 523-532 (1989); McCarty, et al., Cell 66: 895-905 (1991); Hattori, et al., Genes Dev. 6: 609-618 (1992); Goff, et al., EMBO J. 9: 2517-2522 (1990), all of which are herein incorporated by reference in their entirety). Transient expression systems may be used to functionally dissect gene constructs (See generally, Mailga et al., Methods in Plant Molecular Biology, Cold Spring Harbor Press (1995)).

[0221] Any of the nucleic acid molecules of the present invention may be introduced into a plant cell in a permanent or transient manner in combination with other genetic elements such as vectors, promoters enhancers etc. Further any of the nucleic acid molecules of the present invention may be introduced into a plant cell in a manner that allows for over expression of the protein or fragment thereof encoded by the nucleic acid molecule.

[0222] Cosuppression is the reduction in expression levels, usually at the level of RNA, of a particular endogenous gene or gene family by the expression of a homologous sense construct that is capable of transcribing mRNA of the same strandedness as the transcript of the endogenous gene (Napoli et al., Plant Cell 2: 279-289 (1990); van der Krol et al., Plant Cell 2: 291-299 (1990), both of which are herein incorporated by reference in their entirety). Cosuppression may result from stable transformation with a single copy nucleic acid molecule that is homologous to a nucleic acid sequence found with the cell (Prolls and Meyer, Plant J. 2:465-475 (1992), herein incorporated by reference in its entirety) or with multiple copies of a nucleic acid molecule that is homologous to a nucleic acid sequence found with the cell (Mittlesten et al., Mol. Gen. Genet. 244: 325-330 (1994), herein incorporated by reference in its entirety). Genes, even though different, linked to homologous promoters may result in the cosuppression of the linked genes (Vaucheret C. R Acad. Sci. III 316: 1471-1483 (1993), herein incorporated by reference in its entirety).

[0223] This technique has, for example been applied to generate white flowers from red petunia and tomatoes that do not ripen on the vine. Up to 50% of petunia transformants that contained a sense copy of the chalcone synthase (CHS) gene produced white flowers or floral sectors; this was as a result of the post-transcriptional loss of mRNA encoding CHS (Flavell, Proc. Natl. Acad. Sci. (U.S.A.) 91:3490-3496 (1994)), herein incorporated by reference in its entirety). Cosuppression may require the coordinate transcription of the transgene and the endogenous gene, and can be reset by a developmental control mechanism (Jorgensen, Trends Biotechnol, 8:340344 (1990); Meins and Kunz, In: Gene Inactivation and Homologous Recombination in Plants (Paszkowski, J., ed.), pp. 335-348. Kluwer Academic, Netherlands (1994), both of which are herein incorporated by reference in their entirety).

[0224] It is understood that one or more of the nucleic acids of the present invention including those comprising SEQ ID NO:1 through SEQ ID NO:6167 or complement thereof or fragments of either or other nucleic acid molecules of the present invention may be introduced into a plant cell and transcribed using an appropriate promoter with such transcription resulting in the co-suppression of an endogenous protein.

[0225] Antisense approaches are a way of preventing or reducing gene function by targeting the genetic material (Mol et al., FEBS Lett. 268: 427-430 (1990), herein incorporated by reference in its entirety. The objective of the antisense approach is to use a sequence complementary to the target gene to block its expression and create a mutant cell line or organism in which the level of a single chosen protein is selectively reduced or abolished. Antisense techniques have several advantages over other ‘reverse genetic’ approaches. The site of inactivation and its developmental effect can be manipulated by the choice of promoter for antisense genes or by the timing of external application or microinjection. Antisense can manipulate its specificity by selecting either unique regions of the target gene or regions where it shares homology to other related genes (Hiatt et al., In Genetic Engineering, Setlow (ed.), Vol. 11, New York: Plenum 49-63 (1989), the entirety of which is herein incorporated by reference).

[0226] The principle of regulation by antisense RNA is that RNA that is complementary to the target mRNA is introduced into cells, resulting in specific RNA:RNA duplexes being formed by base pairing between the antisense substrate and the target mRNA (Green et al., Annu. Rev. Biochem. 55: 569-597 (1986), herein incorporated by reference in its entirety). Under one embodiment, the process involves the introduction and expression of an antisense gene sequence. Such a sequence is one in which part or all of the normal gene sequences are placed under a promoter in inverted orientation so that the ‘wrong’ or complementary strand is transcribed into a noncoding antisense RNA that hybridizes with the target mRNA and interferes with its expression (Takayama and Inouye, Crit. Rev. Biochem. Mol. Biol. 25: 155-184 (1990), herein incorporated by reference in its entirety). An antisense vector is constructed by standard procedures and introduced into cells by transformation, transfection, electroporation, microinjection, or by infection, etc. The type of transformation and choice of vector will determine whether expression is transient or stable. The promoter used for the antisense gene may influence the level, timing, tissue, specificity, or inducibility of the antisense inhibition.

[0227] It is understood that protein synthesis activity in a plant cell may be reduced or depressed by growing a transformed plant cell containing a nucleic acid molecule whose non-transcribed strand encodes a protein or fragment thereof.

[0228] Antibodies have been expressed in plants (Hiatt et al., Nature 342:76-78 (1989); Conrad and Fielder, Plant Mol. Biol. 26: 1023-1030 (1994), both of which are herein incorporated by reference in their entirety). Cytoplamic expression of a scFv (single-chain Fv antibodies) has been reported to delay infection by artichoke mottled crinkle virus. Transgenic plants that express antibodies directed against endogenous proteins may exhibit a physiological effect (Philips et al., EMBO J. 16: 4489-4496 (1997); Marion-Poll, Trends in Plant Science 2: 447-448 (1997), both of which are herein incorporated by reference in their entirety). For example, expressed anti-abscisic antibodies reportedly result in a general perturbation of seed development (Philips et al., EMBO J. 16: 4489-4496 (1997)).

[0229] Antibodies that are catalytic may also be expressed in plants (abzymes). The principle behind abzymes is that since antibodies may be raised against many molecules, this recognition ability can be directed toward generating antibodies that bind transition states to force a chemical reaction forward (Persidas, Nature Biotechnology 15:1313-1315 (1997); Baca et al., Ann. Rev. Biophys. Biomol. Struct. 26:461-493 (1997), both of which are herein incorporated by reference in their entirety). The catalytic abilities of abzymes may be enhanced by site directed mutagensis. Examples of abzymes are, for example, set forth in U.S. Pat. No. 5,658,753; U.S. Pat. No. 5,632,990; U.S. Pat. No. 5,631,137; U.S. Pat. No. 5,602,015; U.S. Pat. No. 5,559,538; U.S. Pat. No. 5,576,174; U.S. Pat. No. 5,500,358; U.S. Pat. No. 5,318,897; U.S. Pat. No. 5,298,409; U.S. Pat. No. 5,258,289 and U.S. Pat. No. 5,194,585, all of which are herein incorporated in their entirety.

[0230] It is understood that any of the antibodies of the present invention may be expressed in plants and that such expression can result in a physiological effect. It is also understood that any of the expressed antibodies may be catalytic.

[0231] In addition to the above discussed procedures, practitioners are familiar with the standard resource materials which describe specific conditions and procedures for the construction, manipulation and isolation of macromolecules (e.g., DNA molecules, plasmids, etc.), generation of recombinant organisms and the screening and isolating of clones, (see for example, Sambrook et al., Molecular Cloning: A Laboratory Manual, Cold Spring Harbor Press (1989); Mailga et al., Methods in Plant Molecular Biology, Cold Spring Harbor Press (1995); Birren et al., Genome Analysis: Analyzing DNA, 1, Cold Spring Harbor, N.Y., all of which are herein incorporated by reference in their entirety).

[0232] The nucleotide sequence provided in SEQ ID NO:1, through SEQ ID NO:6167 or fragment thereof, or complement thereof, or a nucleotide sequence at least 90% identical, preferably 95%, identical even more preferably 99% or 100% identical to the sequence provided in SEQ ID NO:1 through SEQ ID NO:6167 or fragment thereof, or complement thereof, can be “provided” in a variety of mediums to facilitate use fragment thereof. Such a medium can also provide a subset thereof in a form that allows a skilled artisan to examine the sequences.

[0233] In one application of this embodiment, a nucleotide sequence of the present invention can be recorded on computer readable media. As used herein, “computer readable media” refers to any medium that can be read and accessed directly by a computer. Such media include, but are not limited to: magnetic storage media, such as floppy discs, hard disc, storage medium, and magnetic tape: optical storage media such as CD-ROM; electrical storage media such as RAM and ROM; and hybrids of these categories such as magnetic/optical storage media. A skilled artisan can readily appreciate how any of the presently known computer readable mediums can be used to create a manufacture comprising computer readable medium having recorded thereon a nucleotide sequence of the present invention.

[0234] As used herein, “recorded” refers to a process for storing information on computer readable medium. A skilled artisan can readily adopt any of the presently known methods for recording information on computer readable medium to generate media comprising the nucleotide sequence information of the present invention. A variety of data storage structures are available to a skilled artisan for creating a computer readable medium having recorded thereon a nucleotide sequence of the present invention. The choice of the data storage structure will generally be based on the means chosen to access the stored information. In addition, a variety of data processor programs and formats can be used to store the nucleotide sequence information of the present invention on computer readable medium. The sequence information can be represented in a word processing text file, formatted in commercially-available software such as WordPerfect and Microsoft Word, or represented in the form of an ASCII file, stored in a database application, such as DB2, Sybase, Oracle, or the like. A skilled artisan can readily adapt any number of data processor structuring formats (e.g. text file or database) in order to obtain computer readable medium having recorded thereon the nucleotide sequence information of the present invention.

[0235] By providing one or more of nucleotide sequences of the present invention, a skilled artisan can routinely access the sequence information for a variety of purposes. Computer software is publicly available which allows a skilled artisan to access sequence information provided in a computer readable medium. The examples which follow demonstrate how software which implements the BLAST (Altschul et al., J. Mol. Biol. 215:403-410 (1990)) and BLAZE (Brutlag et al., Comp. Chem. 17:203-207 (1993), the entirety of which is herein incorporated by reference) search algorithms on a Sybase system can be used to identify open reading frames (ORFs) within the genome that contain homology to ORFs or proteins from other organisms. Such ORFs are protein-encoding fragments within the sequences of the present invention and are useful in producing commercially important proteins such as enzymes used in amino acid biosynthesis, metabolism, transcription, translation, RNA processing, nucleic acid and a protein degradation, protein modification, and DNA replication, restriction, modification, recombination, and repair.

[0236] The present invention further provides systems, particularly computer-based systems, which contain the sequence information described herein. Such systems are designed to identify commercially important fragments of the nucleic acid molecule of the present invention. As used herein, “a computer-based system” refers to the hardware means, software means, and data storage means used to analyze the nucleotide sequence information of the present invention. The minimum hardware means of the computer-based systems of the present invention comprises a central processing unit (CPU), input means, output means, and data storage means. A skilled artisan can readily appreciate that any one of the currently available computer-based system are suitable for use in the present invention.

[0237] As indicated above, the computer-based systems of the present invention comprise a data storage means having stored therein a nucleotide sequence of the present invention and the necessary hardware means and software means for supporting and implementing a search means. As used herein, “data storage means” refers to memory that can store nucleotide sequence information of the present invention, or a memory access means which can access manufactures having recorded thereon the nucleotide sequence information of the present invention. As used herein, “search means” refers to one or more programs which are implemented on the computer-based system to compare a target sequence or target structural motif with the sequence information stored within the data storage means. Search means are used to identify fragments or regions of the sequence of the present invention that match a particular target sequence or target motif. A variety of known algorithms are disclosed publicly and a variety of commercially available software for conducting search means are available and can be used in the computer-based systems of the present invention. Examples of such software include, but are not limited to, MacPattern (EMBL), BLASTIN and BLASTIX (NCBIA). One of the available algorithms or implementing software packages for conducting homology searches can be adapted for use in the present computer-based systems.

[0238] The most preferred sequence length of a target sequence is from about 10 to 100 amino acids or from about 30 to 300 nucleotide residues. However, it is well recognized that during searches for commercially important fragments of the nucleic acid molecules of the present invention, such as sequence fragments involved in gene expression and protein processing, may be of shorter length.

[0239] As used herein, “a target structural motif,” or “target motif,” refers to any rationally selected sequence or combination of sequences in which the sequences or sequence(s) are chosen based on a three-dimensional configuration which is formed upon the folding of the target motif. There are a variety of target motifs known in the art. Protein target motifs include, but are not limited to, enzymatic active sites and signal sequences. Nucleic acid target motifs include, but are not limited to, promoter sequences, cis elements, hairpin structures and inducible expression elements (protein binding sequences).

[0240] Thus, the present invention further provides an input means for receiving a target sequence, a data storage means for storing the target sequences of the present invention sequence identified using a search means as described above, and an output means for outputting the identified homologous sequences. A variety of structural formats for the input and output means can be used to input and output information in the computer-based systems of the present invention. A preferred format for an output means ranks fragments of the sequence of the present invention by varying degrees of homology to the target sequence or target motif. Such presentation provides a skilled artisan with a ranking of sequences which contain various amounts of the target sequence or target motif and identifies the degree of homology contained in the identified fragment.

[0241] A variety of comparing means can be used to compare a target sequence or target motif with the data storage means to identify sequence fragments sequence of the present invention. For example, implementing software which implement the BLAST and BLAZE algorithms (Altschul et al., J. Mol. Biol. 215:403-410 (1990)) can be used to identify open frames within the nucleic acid molecules of the present invention. A skilled artisan can readily recognize that any one of the publicly available homology search programs can be used as the search means for the computer-based systems of the present invention. Having now generally described the invention, the same will be more readily understood through reference to the following examples which are provided by way of illustration, and are not intended to be limiting of the present invention, unless specified.

### EXAMPLE 1

[0242] The cDNA library (LIB33102) is prepared from early ovary tissue, which is harvested at the pre-meiotic to meiotic stage. Lilium asiatic bulbs are planted approximately 1 inch deep in a mix of ⅔ Ready Earth and ⅓ Perlite in 9″ drainage pots. Plants are watered approximately 2 times per week with a 1:400 dilution of Gnatrol. Lily plants are grown in lab U404 on a growth rack in 15 hr day/9 hr night cycles. The average temperature of the room is 70 F. Lighting is provided by TL80 fluorescent lights. Lily ovaries are collected at the pre-meiotic to meiotic stage. At this stage, buds are 1.5-2 cm and anthers are green. The harvested ovary tissue is frozen in liquid nitrogen and crushed. Total RNA is extracted using Trizol as recommended by the manufacturer (Gibco BRL, Life Technologies, Gaithersburg, Md.).

[0243] For the cDNA library of the present invention, the Superscript™ Plasmid System for cDNA synthesis and Plasmid Cloning (Gibco BRL, Life Technologies, Gaithersburg, Md.) or similar system, following the conditions suggested by the manufacturer, is used. Poly A+ mRNA is purified from the total RNA preparation using Dynabeads® Oligo (dT)₂₅ (Dynal Inc., Lake Success, N.Y.), or equivalent methods. Clones are selected and the plasmid DNA is isolated using a commercially available kit. The template plasmid DNA clones are used for subsequent sequencing.

[0244] The quality of the cDNA libraries is determined by examining the cDNA insert size, and also by sequence analysis of a random selection an appropriate number of clones from the library.

### EXAMPLE 2

[0245] The cDNA library (LIB3103) is prepared from late lily ovule tissue harvested at the mitotic to mature ovule stage. Lilium asiatic bulbs are planted approximately 1 inch deep in a mix of ⅔ Ready Earth and ⅓ Perlite in 9″ drainage pots. Plants are watered approximately 2 times per week with a 1:400 dilution of Gnatrol. Lily plants are grown in lab U404 on a growth rack in 15 hr day/9 hr night cycles. The average temperature of the room is 70 F. Lighting is provided by TL80 fluorescent lights. Lily ovules are collected at the mitotic to mature ovule stage. At this stage, buds are larger than 3 cm and anthers are brown. The harvested ovule tissue is frozen in liquid nitrogen and crushed. Total RNA is extracted using Trizol as recommended by the manufacturer (Gibco BRL, Life Technologies, Gaithersburg, Md.).

[0246] For the cDNA library of the present invention, the Superscript™ Plasmid System for cDNA synthesis and Plasmid Cloning (Gibco BRL, Life Technologies, Gaithersburg, Md.) or similar system, following the conditions suggested by the manufacturer, is used. Poly A+ mRNA is purified from the total RNA preparation using Dynabeads® Oligo (dT)₂₅ (Dynal Inc., Lake Success, N.Y.), or equivalent methods. Clones are selected and the plasmid DNA is isolated using a commercially available kit. The template plasmid DNA clones are used for subsequent sequencing.

[0247] The quality of the cDNA libraries is determined by examining the cDNA insert size, and also by sequence analysis of a random selection an appropriate number of clones from the library.

### EXAMPLE 3

[0248] The cDNA libraries are plated on LB agar containing the appropriate antibiotics for selection and incubated at 37° for a sufficient time to allow the growth of individual colonies. Single colonies are individually placed in each well of a 96-well microtiter plates containing LB liquid including the selective antibiotics. The plates are incubated overnight at approximately 37° C. with gentle shaking to promote growth of the cultures. The plasmid DNA is isolated from each clone using Qiaprep plasmid isolation kits, using the conditions recommended by the manufacturer (Qiagen Inc., Santa Clara, Calif. U.S.A.).

[0249] The template plasmid DNA clones are used for subsequent sequencing. For sequencing the cDNA libraries LIB3102 and LIB3103, a commercially available sequencing kit, such as the ABI PRISM dRhodamine Terminator Cycle Sequencing Ready Reaction Kit with AmpliTaq® DNA Polymerase, FS, is used under the conditions recommended by the manufacturer (PE Applied Biosystems, Foster City, Calif.). The ESTs of the present invention are generated by sequencing initiated from the 5′ end of each cDNA clone.

[0250] A number of sequencing techniques are known in the art, including fluorescence-based sequencing methodologies. These methods have the detection, automation and instrumentation capability necessary for the analysis of large volumes of sequence data. Currently, the 377 DNA Sequencer (Perkin-Elmer Corp., Applied Biosystems Div., Foster City, Calif.) allows the most rapid electrophoresis and data collection. With these types of automated systems, fluorescent dye-labeled sequence reaction products are detected and data entered directly into the computer, producing a chromatogram that is subsequently viewed, stored, and analyzed using the corresponding software programs. These methods are known to those of skill in the art and have been described and reviewed (Birren et al., Genome Analysis: Analyzing DNA,1, Cold Spring Harbor, N.Y., the entirety of which is herein incorporated by reference).

The application's sequence listing, which the Patent Office published only in electronic form, follows.

SEQUENCE LISTING (6167 sequences)

SEQ ID NO: 1 - DNA, 322 bp, Lilium asiatic
agaacatgccttgttgccgtaattggttctttagttaatgataatctatatatgggaaaggatgacctgaaaataggaggctttggaggaaattttagccttaataagggatctgtggctggagtcctgacagtggatacagtagctgattttcttcccagaaaaggtccgcttcgtcagagaagaactgggatagcatacatatcaaatgtctccgttcgtgaggcatacagaatgaaagggattgccaaaatgcttgttgtcaaggcagatgccctatcccggatttgttgctgtcgtttcattgctcttcattgctatg

SEQ ID NO: 2 - DNA, 408 bp, Lilium asiatic
gagcgagcaaaggcggcggctgcgattggcggtggaggaactggtcacgggggggcgacctacaagggctacacgattccggcgccgaagcgctggcatgtcgtcaccggcaagggcctctgcgccgtcatgtggttttgggttctgtatagggctaaacaagatggtcccgtaattttggggtggcgccatccttgggagggacatgatgatcactctcatgggcatgggaatgggcaggagcatgagcatgagccctctcactagaaatctgatgaatgaatgctgagagaagcttctagctgctgcttgtattccgattcatgtgatgtaataaggtagaacaagacatggagttctttcatcatattgcgtaacttgtgttataaattcatgttagctacagtt

SEQ ID NO: 3 - DNA, 226 bp, Lilium asiatic
gatcaagcaatggcagcggctttgattgacgtgtgaacgaacagtacatcggtggtggttacttacaatgtctacacgatttcatacgcctaagcactaatatgtatacaccttcaatgacctatgctccttcatgatattttgggatctgtatatgtctaaacaagattgtcccataatatatgagtttctcacatccttgtgagtgacatgatgatcactataa

SEQ ID NO: 4 - DNA, 411 bp, Lilium asiatic
gccgagatcaccgcttccgttcctcctcctgtcctcagtagccatggtgaagtactcgagagatccctctaatcccaccaaatcctccaagagcatggggagggatctgagggttcacttcaagaacacacgcgagactgcattcgcaatcaggaagatgcctttggccaaggcgaaacggtatctcgaggatgttattgtgcacaagcaggccattccgttcaggaggtattgtggaggtgttggccgtactggccaagtcaaggcacgccattcaaatgggcaagggcgctggcctatgaaatctgctaaatttattttggatctgctcaagaatgctgagagtaatgcagatgtgaagggcttggatgtcgatgctctttatgtatctcacattcaggttaatcaagc

SEQ ID NO: 5 - DNA, 416 bp, Lilium asiatic
gccgagatcaccgctgacgttcctcctgctgtcctcagtggccatggtggggtgcgtcgagagatccctctaatcccaccaaatccttcaagagcatggggagggatctgagggttcacttcaagaacacacgcgagactgcattcgcaatcaggaagatgcctttggccaaggcgaaacggtatctcgaggatgttattgtgcacaagcaggccattccgttcaggaggtattgtggaggtgttggccgtactggccaagtcaaggcacgccattcaaatgggcaagggcgctggcctatgaaatctgctaaatttattttggatctgctcaagaatgctgagagtaatgcagatgtgaagggcttggatgtcgatgctctttatgtatctcacattcaggttaatcaagctcag

SEQ ID NO: 6 - DNA, 149 bp, Lilium asiatic
cggacgcgtgggtttggaaagggtttcactcagcaagcctttcagtacctaaaggagacaggaattatgccaattttgctttcataactttacggtccaagtgatgcttcaatgggtgaacaggaaatgaaaatcaatggttaacccca

SEQ ID NO: 7 - DNA, 421 bp, Lilium asiatic
cggacgcgtgggtttggaaagggtttcactcagcaagcctttcagtacctaaatgagacgggaattatgccaattttgctttcatagctttacggtccacgtgatgcttcaatggatgacaaggaagtgaaaatcagtgttgaaccccatgtcgctccaaggaagggatggccaacacttcccaatcctgcatttcattctcttctgcagttccctcagaagcttcagaactgtttcaagtcacatttcaagcatctgaggaataatgagcagagtggtgatagtttaaaacctatagcattcaagaaagaatcaactgctctggagattagtttggataagcagctgcaggcttggaaagaaaattctacttgggttgatcagccaccagatataaaggtaaccgtgcctaaaggttctc

SEQ ID NO: 8 - DNA, 374 bp, Lilium asiatic
gataacgaccatgttccatttggaccgacctatgtacttgttgggctatattgcgaatgagagtcgcgtgtatcttattgatatggagttcaatgtcataggctacaccttactccttactttaattgagtataaaactctagcgatgctgtgagatttggaccgtgcacaggacgctttaccgtcatgtactaaagtgcattctaacagtgtatctcatgcttcggaactgcgtgacgtgacatatgaagcatctgaagaatcatcagcacagtggtgatagtttgaaacctctatccttcatgaaagaattaacttgttcttgagattattttggataagcagttgctggctttggaaagaaaattcttctt

SEQ ID NO: 9 - DNA, 401 bp, Lilium asiatic
ggcccctcaaaaagaagcaaggtgaaaaaggagaatgatagtgttggagtatcagacaggcttgacaaactagcaaatctggccattctcggtgacggtgaagaagtcccgccttccttacagacaacctcaaagcatccacgtcaccgacttggttgccaatgcatcgtctgcatccagccacctagtggcaaacccaaacacagccaaacttgcacgtgcaacgtatgtgtcactgtgaaacgtcggttcagaacacttacacttaggcgcgagaaacggcagtcagagaaggaagctgatgatgcccgcatacattaccaatcaactgagatatcgccgagcagtaaaagtaatgatgatcacgagtctgagcgtgggaagcctttgccatcgccatc

SEQ ID NO: 10 - DNA, 365 bp, Lilium asiatic
ggcccctcaaaaagaagcaaggtgattaaggagaatgatagtgttgtagtgtcggacaggcttgacaaactagcaaatctggccattctcggtgacggtgaagaagtcccgccttccttacagacaacctcaaagcatccacgtcaccgacttggttgccaatgcatcgtctgcatccagccacctagtggcaaacccaaacacagccaaacttgcacgtgcaacgtatgtgtcactgtgaaacgtcggttcagaacacttacacttaggcgcgagaaacggcagtcagagaaggaagctgatgatgcccgcatacattaccaatcaactgagatatcgcctagcagtataagtaatgatgatca

SEQ ID NO: 11 - DNA, 419 bp, Lilium asiatic
cggacgcgtgggtccttgccgagatcaatgagctaaaggctaaactcggagccgaagaaagtcggagcatagcactagagtctgacatcaaaaacaaagacctcacggaagaggagcctccagtcttgatattctaccaggatgggccagctgacagcgactcgagcgctgtcctcaacgatgacactcatccagtggcatcaacactagttgattcgaaggccacagcaattgggtttgccttcctccacaatcaattgatgaaggcagaggagcaggattttgatgagccttgcagcaacttctttgctgatgagcaggctccgacactcccatggtgctattcggatcattggaattggatggatgatggtggagagcatgacattagcaaaaaggactgagccttttgagaagat

SEQ ID NO: 12 - DNA, 463 bp, Lilium asiatic
  modified_base (448)..(448): a, c, g, t, unknown, or other
cccacgcgtccgcccacgcgtccgatcaagtacttttatgacattaaagatcttggcaatttgagggctaatccggattacaagggtgtatgccatgttgctcttgcccaagaaggtcattgtagaccgggagaggtattactgggcacagattcccacacatgcacagcaggtgcgtttggtcagtttgctactggaattggcaacactgatggaggttttgtcctgggtactgggaagcttctacttaaggtaccccctaccttgagatttgttttggatggagaaatgcccaattatctgctcgcgaaggatttgattttgcaaattattggtgagatcacagtttctggtgcaacatacaaatccatggagtttgttggctctgccattgagtgtttaaatatggaagagcggatgacattgtgcaacatggttgtcgaagcanggggtaaagaatggg

SEQ ID NO: 13 - DNA, 132 bp, Lilium asiatic
cggacgcttggttttcttagaaatctgacttctaaatctaagtatcctctcttcaggagggcttgtaccatcgtcacctgtatagatcccagaaattgctaagtctgctctttgacaatgaagaatagaacc

SEQ ID NO: 14 - DNA, 113 bp, Lilium asiatic
gccggcgaatcggaaaaatgttgaatgggcgtcatggtctagctcgttctattgtacgttcgagaaacgattctcggctacaagcgatcgaagtcttatcattaccatatcac

SEQ ID NO: 15 - DNA, 461 bp, Lilium asiatic
ctctcatataacaatttttcaggcgaaattccagtcctcctatcgaattgtacatacctaaatgttcttaatcttcagcataaccagttgaccggccagatcccgggtcagctaagtatgctgactcgtctgactagtctcaatgtggccgataatctcttatcgggaccaattcctaatttcagtagaatcaatactacctttcaagaggcaagttttgcaaacaacataggactttgtggtgcgcctttagatacttgcaaggcacctcgaaagagtattaatactggtgttataatcggtgctgctattggtggtgtggtcataactattttaattggtggagttgttatattcttctgtttgcgtaacctacctaataagatgaaggagaaagatgtcgaaaacaaatgggcaaatagcattaaaagaggcaaaggcattaagggctctatgtttga

SEQ ID NO: 16 - DNA, 399 bp, Lilium asiatic
gtcaagccatacattcctgacttcaagcttgcgttcgagcacttctgcattcaggccggtgggcgggcggtcatcgacgagctcgagaagaacctccagctcctcccggtccatgtcgaggcatcacgaatgaccctccatcgattcggcaacacatcatcgagctccatctggtacgagcttgcctatattgaagcaaaaggaaggatgcggaaaggccaccgcgtctggcagatcgcctttgggagcggattcaagtgcaatagtgtggtctggcaggcgctccgcaatgtgaagccctctgccaacagcccgtggatggattgcattagcaggtatccgatggagattatagacgggatcccgactcccgaggcacagcatccatagcggaagctt

SEQ ID NO: 17 - DNA, 233 bp, Lilium asiatic
aagccatacattcctgactacaatctttcgttcgatcacttcagcatacagggcagtgtacttgcaatcatcgacgagctcgagaagaacctacatctcctacctgtccatgtcttaggcatcacgaatgaccctccatcgattctgcaactcatcatctagctccatctgttacgagcttgcctatattgatacaaaatgaaggatgcacctaggccaccgtgtctttcaaa

SEQ ID NO: 18 - DNA, 110 bp, Lilium asiatic
gctcgtacgttctcatataacaagctatcatgctaaagctcttatctaatatccaatacctcatggctcggggtccttaatatagagagtagccacttcacatgccagat

SEQ ID NO: 19 - DNA, 387 bp, Lilium asiatic
gctattctgaagcatggatatgcaagatggcaaactatgattgaagataaggaacttgggcttgctgatgttgttcagcaagtgttaaaccttcctcccgtaactggacaggttactggggatgtcccagtgcctgatggctctagttcaagtcacactgcaaatggaggtattgaagctaataaaggtagccagccaaatacagattaccctgcccagtatcaaatcagagaacttcatcgtaggatggttgacttcattaaaaaacgatatcttctactggagaaagctctcaatgcggaatattgtttagcacaaatcggttatactagaccgcttgagtccggaaaacaagatccagaggccgaccaagacaacactgaaatg

SEQ ID NO: 20 - DNA, 428 bp, Lilium asiatic
cttgatgaagctgtgaagaatgttgagcagaaacctgcagatgtggttgatggagctggtgatggtcaacatagtgctggagataataatggaaaagtttctggcgaagaagagagtgaagatgaagaggacccctctattttaatggagcccctcttgacagagaagaaagaacacaaagaatttgaaatatttgttggtaaattggacaaagaagcagttgaggatgatttagttaaggtctttggtgtgtttggggagatcaaatctgtaagaattgttaagcacccgtctacacagaaaagtaagggatttgggtttgtacgttatgtgaatatggaaaatgccaagaaagctcttgctgagttaaaagattgggtggaggtgaaaggcaagcatggcaagatatcagctagtaatgacaatga

SEQ ID NO: 21 - DNA, 375 bp, Lilium asiatic
cggacgcgtgggcaagccccaccacctgagaggcagcatgcatctttaccccgagcctgtgtgatttcatccagggaacacaccacaaaattcagctgacatagctgaggatgttcctaaatgttacattaaggaagctgacaagccacaacaagatacttgcatggttccagtgacgagagttccactacaagttcctcagagggtccaaggctctactgcaaaacctggaaaagtcattggatcagtgttgcggtacaacagcagcacaacagcatccgcagaggtgtatgaacagcgaagaggtgcgagagtcccagctattcctttccaatgcgtgccttttggttcatacccatgatgaaatcctgggtg

SEQ ID NO: 22 - DNA, 313 bp, Lilium asiatic
ctgactcatgggtgaagatcttgcttcactttatatggattactaggtatttgatgctcagtgtgcttacattgtggttggtgaagtacctgaaaattatttagctattacctaacttaactatattataacccctttatctataaacattcctcttactcagtttatattgatcacattctaattttaatcaatttaacttaaatctttcatattaattcaacttatcactcttaaccaaacttatatgtttgattatgtatctatatatttgatataattgataaacatctcttatatcacatataaattt

SEQ ID NO: 23 - DNA, 331 bp, Lilium asiatic
cgtccggctattctgaagcatggatatgcattatggctaactatgattgaagataaggaggtagtgcttgctgatgttgttcagcaagtgttaaaccttcctcccgtaactggacaggttactggggatgacccagttcctgatggctctagttcaagtcacactgcaaatggaggtattgaatctaatataggtagccagccaaattacagattaccctgcccagtatcaaatcatataacttcatcttaaaatggatgactctattaaaaaacgatatcttctactgtatgaaagctctcaatgctgaatattgtttatcacatatcgg

SEQ ID NO: 24 - DNA, 210 bp, Lilium asiatic
ggctatgctgaagcatggatttgcattataggctaactatgattgaagataacgagggtagggcttgctgatgttgagcaggacgtgttaaacactatctaccgtattctggacaggttactggaggatgtcccatagcctgatgtctctagtacaattttcactgcaaaagtatgcattgaagctaataaaagtatccagacaaataca

SEQ ID NO: 25 - DNA, 421 bp, Lilium asiatic
gcctcaggggagatatttggtggtgattctcgtatgactgatcttgaatctcacgtttccccttttaatgagcaaggaaaaattactatcggtagatgagcttgagccatttagtcatcatgcttcccaaatggcagcattagactacatcgtatcaatagaaagcgatgtatttgtcccctcttattctgggaacatggcgagggcagttgagggtcatcgccgcttcctcggccacagaaaaacaattactcctgacagaaaagcgcttgttcgattatttgataaaattgactctggatcattaagcgaaggaaaaaagttgtcgaacttggttttagaaatacataaaagaagaaaagggtcccctcgtaaacggaaagggcctattactggaaccaagggtaaagaaaggttccga

SEQ ID NO: 26 - DNA, 361 bp, Lilium asiatic
gcctcaggggagatatttggtggtgtttctcgtatgactgatcttgaatggcagtttccccttttaatgagcaaggaaaaattactatcggtagatgagcttgagccatttagtcatcatgcttcccaaatggcagcattagactacatcgtatcaatagaaagcgatgtatttgtcccctcttattctgggaacatggctagggcagttgagggtcatcgccgcttcctcggtcacagaaaaacaattactcctgacagaaaagcgcttgttcgattattagataaaattgactctggatcattaagcgaatgaaaaaagttgtcgaacttggttttagaaatacataatataagaaaag

SEQ ID NO: 27 - DNA, 209 bp, Lilium asiatic
atctcagtctcacccaaagcttgaatcatgtctgtgcctgatcaagtctggaagtttctcttcataatcagcatggaaatattactatcttttgattatctttagccatacattcatcattctttctaaatatcatcattttactacattttatttatatatatctatttatatttccatttcttattttttttacatttttttttcat

SEQ ID NO: 28 - DNA, 315 bp, Lilium asiatic
cggacgcgtgggtgaagatcttgctgcactgtagaaggattacgaggaggttggtggtgagggtgctgaaggtgatgatggtgaagaacctgaagattattgagcagttacctatcgtaactgtgttttagcgtgtatttctataatctctgttcttgctggggttttcttgttagtgtcttctttttctttgttgaacttgaagcttggtatctttcaacttgttactcctgtccagacttatatgattggctattgagctattgtttgatataaaaaaaatttatttatttttatatttttattatatatatt

SEQ ID NO: 29 - DNA, 216 bp, Lilium asiatic
gtcctcggtgagagggggcggcggattcgggagctgacctcggtcatccagaagaggtgcaaatttcccgagaacgcagttgagctgtatgctgagaaggtgaacaaccgtgggctctgtgccgtggctcaagctgagtctctccgttacaagctccttggtggccttgctgtcaggagggcttgttatggggtccttaggttcattatggaaaat

SEQ ID NO: 30 - DNA, 460 bp, Lilium asiatic
aggcggccaacttcacttcccaggttatcatcatgaaccaccctggccagattggtaatggtgatgctcctgtcctggattgccatacctctcacattgctgtcaagtttgctgagatcctgaccaagatcgacaggcgctctggtaaggaaatcgagaaggagcccaagtttttgaagaatggtgatgctggatttgtgaagatgattccgaccaagcctatggtggtggagactttctctgagtatcctccgcttgggcgttttgctgttagggacatgcgccagactgttgctgttggggttattaagagtgttgagaagaaagatcccactggtgccaaggtgaccaaagctgctatcaagaagaagtgaggtgttcttcaatttatgtctgagtttcttaagatctgcaagagtctagttggtaatgcttgtttttgtttatcgaactttcgtgt

SEQ ID NO: 31 - DNA, 292 bp, Lilium asiatic
gtggcagctggcattatgaccaactgggcattgtcgaagcaccgccgcttgaagaggttgtgtgactgataagaaggactacggaaataccctctacgattggtgatatttccttcattcctctgaggcatggtggcttttaagcttgatttctctttgattgtactttatattcactgtaatttatctctactatttaattgatcattgttgttacttgtatgttattttttgactaatcattgttttttattttcctatttatatttcctatgactttttaattactttt

SEQ ID NO: 32 - DNA, 424 bp, Lilium asiatic
cagcaaatcgctatggcgctacccgtccagcagaccgtcgagtaccccaacttgaagcgttgtcctcgtcggtgatggcggcacagggaagacgacattcgtcaaacgtcatctgactggtgaattcgagaagaaatatgaaccaactattggtgttgaggtgcatcctctggatttcttcaccaattgcgggaagatcaggttctactgctgggacactgctggtcaggagaagtttggtgggctgcgcgatggctattacatccatggtcagtgtgcaatcatcatgtttgatgttactgcacgccttacctacaagaatgttcctacttggcatagagatctttgccgagtatgtgagaacattccgattgtgctttgtggcaacaaagttgatgtgaagaacaggcaggtgaaagccaaa

SEQ ID NO: 33 - DNA, 123 bp, Lilium asiatic
gagcatattgctatggcgctacggtttcagcagaccgtctagtgtcctccacaagaggggttaatttgtcgataacgcaggctcactgtatactacaatcgtgaacaatcgtgtgctctgtgc

SEQ ID NO: 34 - DNA, 146 bp, Lilium asiatic
ttcgacttttcaccgttcatggttctgatcattgcaatccttaatgatggtacgatcgtttccatctcgaaagacagagtgaaaccatccccgctgcccgacagttggaagctaaaagagatctttgcaactggtgtggtgctagg

SEQ ID NO: 35 - DNA, 417 bp, Lilium asiatic
ggccatcgaagaaaggtgtgaacagataagatctgcaatggaattaagcacctgggactacgataaagagaagttgcaagaacgattggcaaagctttccggtggtgttgctgtcctgaagattggaggggctagtgaggcagaggttagtgagaagaaggatagagtcaccgatgctttgaatgctacaaaggctgccgttgaagagggaattgtgccaggcggtggtgtcgcacttctctatgcatcaaaggagctggagaaactgcagactgctaactttgatcagaagattggtgttcaaatcattcagaatgctctgaagagccctgtatatacaattgcttcaaatgctggagttgaaggagctgttgttgttggcaaacttttggagcaagataacccggatcttggata

SEQ ID NO: 36 - DNA, 442 bp, Lilium asiatic
gcgtccgagcggccaacttcacttcccatgttatcatcatgaaccaccctggccagattgggaatggtgatgctcctgtcctggattgcgatacctctcacattgctgtcaagtttgctgagatcctgaccaagatcgacaggcgctctggtaaggaaatcgagaaggatcccaagtttttgaagaatggtgatgctggatttgtgaagatgattccgaccaagcctatggtggtggagactttctctgagtatcctccgcttggtcgttttgctgttagggacatgctccatactgttgctgttgggtgtattaagagtgttgagaataatgatcctactggtgccaaagtgaccaatgctgctatcaagaagaagtgatgtgttcttcaatttatggtcttagtttcttaagaatctcagattccaatttttaatgcttg

SEQ ID NO: 37 - DNA, 202 bp, Lilium asiatic
gtgatgggtctattcggtaaaactgttcctaaaacagcagaaattttccgagcgcttggtacaggcgagaaaggtgttgggaaaagtggcaaacctcttcattacaaggggagctcattccatagaatcattcctagctttatactccagtgtgacgattgaactcttggtgattgctggggatgctagtcattctgtcgtt

SEQ ID NO: 38 - DNA, 351 bp, Lilium asiatic
cgccgtcaacattcgcaggggtcgactggcgagaacaccaaatgggcacgggaagcgggatctttgggaagcggcggaacaagactcacacgctgtgcgtgcgctgctggctgtggtgctgatatgttgagatgagccggtatacgttattgagatgatcgatcgagcggatgctgctgtgtatgctgcacatgctggcgttgaagagggaattgtgccaaactgtggtgttgagcttctttatgcatgaaacgagctggtgaaactgcatactgctaactttgatcagaacattggtgtttaaatcatttataatgctttgaagagccctgtatatacaattgcttcaaa

SEQ ID NO: 39 - DNA, 123 bp, Lilium asiatic
ttccctcgtctacccacacttccagtccttctactatacctttaaacatttcctatcaccactaaaattaatcaccaagaacgtttttaatataaaattttcaacatcaatcttcaaatcttt

SEQ ID NO: 40 - DNA, 298 bp, Lilium asiatic
aaacaacattctgatggaacttagtgccgcggttgatgtgtccataggatggggcagttctctagttcggtcttgagacgtaagtggaggcaataattctgaggaagcatacaatgaatctcagggaatggcaagcgaatgccctgttcttctatgctattctctatgaataccatttgtcaatttgttggactggctgaaatggttagtcatgtcgattatgagaagactatggactattggcatcttgacaagtggtttgtctgttttccggtataacgtcatattgtgaatgatg

SEQ ID NO: 41 - DNA, 359 bp, Lilium asiatic
caaagttctatatcatcaaatcattcagcgaggatgacgttcataaaagggtcgagtatggtgtttgggcaagtaccccaaatggaaacaagaagttggagggggcatacaatgaagctcaaggaatggcaggcgaatgccctgtctatctgctattctctgtgaataccattgggcaatttgttggtctggctgaaatggttggtcaggtcgattttgagaagactatggactattggcagcatgacaagtggtttggctgctttccggtaaaatggcatattgtgaaggatgtacccaacagcattcttgaagcatataacactcgagaacaatgacaacatgcctgtaacaaacag

SEQ ID NO: 42 - DNA, 243 bp, Lilium asiatic
gatagttctatatcatcaaattattctagcgaggatgacgttcataaaagggtcgggtattttgtttgggcaggggcctcaaatggaaacaagaagttgtatgatggcatacatttaatctcaaggaatgtcaagctaatgccctgtctttctgctattctctgttaataccattgggcaatttgttggtctgtctgaaatggttggtcaggtctattttgagaagactatgtactattgtca

SEQ ID NO: 43 - DNA, 136 bp, Lilium asiatic
acccacgcttccactaacacgcattcacaccataccttttacattataacaccaacaaaccaacaccagaaaaacgtacaaatataaaaggatctaagcacaaaatataatcaccaaaatccaaaccaccaataaa

SEQ ID NO: 44 - DNA, 421 bp, Lilium asiatic
ggtagttcaactgtcgattgcaaagcctattctgagcagtatagagatttcgacgttttgaaccgacttgaagaggatggtataactgtagagttgccatgggataaagttaccgtattattcaaccatgctagattacttgagcaacaacatcaggttgacaaagcctgccttttttacaggctgatcttgttcaagtatcctgactacatcgatgcgtatctaaggcttgcagcaatatccgaagcacggaataatataccactaagcatggaattgattggggatgcccttaaggtcaatgacaagtgccccaatgctatgctgatgcttggtcggctggagcttaagagcgatgactgggtgaaagcaaaagaaacttttgttgctgccaacactgctagtaatggaaaagattctt

SEQ ID NO: 45 - DNA, 458 bp, Lilium asiatic
cggacgcgtgggcaacggcacaccatgcaaaggaccagccacagaagaggctgaatggtaaagcacttcatgtgatgtgctttcatcaacttctcgatagatatgcacagtgcaagtctggccggtaacatttgtcacaacaaatctccatgcaccgccagctaggccaactgagtccaaccaaagcttaacttcccactcacaaacagccaagcgatgcatccgtacaccaaccaattcatgaactttgagcgcaatttcttccaatatcatgcacactatggcttcctcttgaccagcagttatgtcgatctttcttgaatatggtaaaagatctctaatccgttgctgttgtaagatgcaaaggtacatgtgtgaatgatccgctctgattgtcgcattgtgcatgtacagctctatctcttctagagccgccattaatgatctgattatactgc

SEQ ID NO: 46 - DNA, 316 bp, Lilium asiatic
cggacgcgtggggtccgattgctacttgaacttcaaggaggagctcgacaaacttggtgagggtaagctgcgagaccgcagccgagacatccacaagacaggcatgtacctaatgctcgcggtgcacgagctcgtctcctccgacctatgtgaagggaggttcgtgtttggccaagtaaccaagcggtctcggttcactatcaacctagaaaccaagagcagtattgtcaaggacggtatgaaccctaaaagtctgctacaaaccttgttgatgcaggcaggtcacagtcctccaaagtacaagacaaagcacctt

SEQ ID NO: 47 - DNA, 458 bp, Lilium asiatic
cggacgcgtggggtccgattgctacttgaacctcaaggaggagctcgacaaacttcttgaaaagaagctgcgagaccccagcctagacatccacaagacaggcaagtacctaatgctcgcggtgcaggagctcgtctcctccgacctatgtgaagggaggttcgtgtttggccgagtaaccaagcggtctcggttcactagcaacctagaaaccaagagcagtattgtcaaggacgggatgaaccctaaaagtctgctacaaaccttgttgatgcgggcaggtcacagtcctccaaagtacaagacaaagcacctcaagacgaacgagttccgagctattgtcgagttcaaaggaatgcagtttgtggggaaggcgaagaagaacaaacaacttgctgagaaggatgctgcagtggaggccttggcatggctgacgcacacatccgataacagccatc

SEQ ID NO: 48 - DNA, 98 bp, Lilium asiatic
  modified_base (86)..(86): a, c, g, t, unknown, or other
cgattagcaaagtctctattctgagctagtatatgagattatcgacgctgggtcataccgtacttgaatgaggagtggtatatatnctgtagaagttg

SEQ ID NO: 49 - DNA, 253 bp, Lilium asiatic
ggaggcactggctctggccttggctctcttctgcttgagcgcctttcagttgaggatggcaagaaatccaagcttggcttcacagtctatccctcacctcaggtctccacatctgttgtggagccttacaacagtgtgctctacacccattctcttctggagcacactgatgttgctgacctgcttgacaatgaaacaatttatgacatcttgaggccctctcttgagattgagcgccttacctacaccaacc

SEQ ID NO: 50 - DNA, 298 bp, Lilium asiatic
cggacgcgtggggttaggttaagtataaagtccccactccggcttgatagtacgtaggaagttggtttttcatataccttgggctctaacttgaaaggaattagttagtcggaatttcaatgccctctgactatttttgacaggttatggctagtttgagtttcgaagttcttgaaataaagtatgttgattgggaataataaatttgttaaattcttattgtgaggtagtgatgatatcatttatgaaatctagtttgagtagacaccgtagttttgcttgcacatttgtctaaaca

SEQ ID NO: 51 - DNA, 421 bp, Lilium asiatic
gcatatgctccacgtgtgaacaaggtgtgtcctgttacagttgtcagagcgagggaagagcaggagacaccagtgaaaaccttgggcttaagtatcgaggaatgcgaagctaatgcagtggcaggaaaattccccgatgctccaccgttctacagaccaccgggtccaaagggaacccccaatgtcaaaccacttcccctaactaggcgtccacgacgtaacaggaggtcgccaactttgagagctgctttccaggaaacacatctcttgcctgcgaatctcgtacttccactgtttatccatgagggtgaggaggatgttccaattggagccatgccgggatgtttcagactgggttggaggcatggcctacttgatgaggtctaccaggctcgggatgttggtgttaatagtgttgttc

SEQ ID NO: 52 - DNA, 394 bp, Lilium asiatic
cggacgcgtggggtccgattgcttcttgaacctcaaggaggagctcgacaaactgcttgaaagcaagctgctagaggccagcgtagacatccacaagacacgcaagtacctaatgctcgcggtgcaagaactcgtctactcctacctatgtgaacggaggtccatgtttggcctagttaccaagcggtctcagctcactagcaacctagaaaccaagagcagtattgtcaaagacggcatgaaccctaaaagtctgctacataccttgatgatgcactcaggtcacaatccttcaaagtacaagacagagcacctcaagacgaacgagttacgagctattgtcaagctcaaaggaatgcaacttgtggggaatgcgattaatagcaaacaactt

SEQ ID NO: 53 - DNA, 379 bp, Lilium asiatic
gcgcttgatgttggtcttgtcaggacatctactggaaatcgagtttttgctgctctggggggaggcttggatggtggtcttgatattcctcacagtgacaagaggtttgctggtttcaagaaagatgacaagcaactggatgcacagattcataggaagtatatctttggaggacatgttgcctcttacatgaggtctctgattgatgatgagcctgagaagtatcagactcacttttctgaattcatcaatagggggattgatccggatcagattgaggagatgtacaagaacgtgcatgctgctatccgtgaagatccgacaatagtcatgtccaccaagccaccaccaaatgagcacaagaggtacaatttgaaga

SEQ ID NO: 54 - DNA, 339 bp, Lilium asiatic
gtctgtatgcgtatatcatacaaggtgagtcctgttacagttgtcagagctaggaaagggcatgttacaccagtgaaaaccttgggcttaagtatcgaggaatgcgaagctaatgcagtggcaggaaaattccccgatgctccaccgttctacagaccaccggttccaaagggaacccccaatgtcaaaccacttcccctaactaggcgttcacgacgtaacaggaggtcgtcaactttgagagctgctttccaggaaacacatctcttgcctgcgaatctcgtacttccactgtttattcattattggtgaggaggatggttccaattggagccattg

SEQ ID NO: 55 - DNA, 205 bp, Lilium asiatic
gtctgtatgcgtatatcatacatggttattcctgtttcagctgtcatatcatgcgatgggcacttgacaccagtgaaaaccttgagcttaagtatcgaggaatgctaagctaatgtcatggcatgtaaattccctgatgctacaccgtcctacataccactctatccaaaggtaacccccattgtcaataccactttccctatct

SEQ ID NO: 56 - DNA, 430 bp, Lilium asiatic
atcatgttcgctctcacctccatcaagggtatcggccgccgatttgccaacatggtctgcaagaaggctgatgttgacatgacaaagagggctggcgagatctcagctgcggagcttgagaatttgatgactattgtggcgaatcctcgtcagttcaagattccggattggtttttgaatagaaagaaggattacaaggatggccgctactcgcaggttgtttctaatgcgttggatatgaagctgagggatgatcttgagcgtctcaagaagataaggaatcaccggggtcttcgtcactactggggccttagagttcgtggtcagcacaccaagaccactggcagaaggggaaagactgttggtgtgtcaaagaaacgttgagctctgcttcttctagttttctagtctgagttgggtctgtctctgg

SEQ ID NO: 57 - DNA, 457 bp, Lilium asiatic
cttgatgttggtcttgtcaggacaactactggaaatcgagtttttggtgctctcaagggagcgttggatggtggtcttgatattcctcacagtgacaagaggtttgctggtttcaagaaagatgacaagcaactggatgcagagattcataggaagtatatctttggaggacatgttgcctcttacatgaggtctctgattgatgatgagcctgagaagtatcagactcacttttctgaattcatcaagagggggattgatccggatcagattgaggagatgtacaagaaggtgcatgctgctatccgtgaagatccgacaatagtcaagtccaccaagccaccaccaaaggagcacaagaggtacaatttgaagaagctgacctatgaggagaggaaggctagccttgtcaagcgtttgaatgccctcaatgatgccaacaatgatgaagatgatg

SEQ ID NO: 58 - DNA, 457 bp, Lilium asiatic
  modified_base (439)..(439): a, c, g, t, unknown, or other
gccggcgaagcggaaaaatggtgaaggggcgacagggcgagcgcgtccgattgtacgttcgtggaacgattctcggctacaagcgatcgaagtcgaatcagtacgagaacacctcgctgatgcagatcgagggggtgaacactaaggaggaggtggcttggtactgtgggaagcggctggcgtatatttacagggcgaaggtgaagaagaacggctcgcattacaggtgtatttggggaaaggttgcgcgtccccatgggaatagtggagtcgtgagggccaagttcaagtctaatcttccacccaaagcgatgggatcaaaggttcgggtcttcatgtaccctagcaacatatgaggtacataacccaatgaacttctattttggtgtagatttatggaagcctgagagcagctggactgaaaattgctgggtgtctntattttcgaaaatgatga

SEQ ID NO: 59 - DNA, 224 bp, Lilium asiatic
tcttctctcttactcttattctgactcttgttcttactcatgggttttttttttttttttttttttttttggttttttttttttttattttttttttttattataatattattatatttttttaattaatttttttttttttaaatttaaatataatttttaatttattttaattctaatgtttatttataaatatatatagttaacacaatattttaaaacat

SEQ ID NO: 60 - DNA, 416 bp, Lilium asiatic
  modified_base (373)..(373): a, c, g, t, unknown, or other
gagcgagcaaaggcggcggcggcgatggcctttggaggaactggtcacggcggcacgacctacaagggctacacgattccggcgccgaagcgctggcatgtcgtcaccggcaagggcctctgcgccgtcatgtggttttgggttctgtatagggctaaacaagatggtcccgtaattttggggtggcgccatccttgggagggacatgatgatcactctcatgggcatgggaatgggcaggagcatgagcatgagccctctcactagaaatctgaggaatgaatgctgagagaagctcctaagctgctgcttgtattccgattcaagtgatgtaataagggtagaacaagacatggagttctttcatcatatngcgtaacttgtgttataaattcatgtttgctacagttgaatgc

SEQ ID NO: 61 - DNA, 148 bp, Lilium asiatic
accacaacccgagcttccacacgatccaatcttacctgctcgtacctctccacgccacggcagggctatagtataacgtcacctgaattcagttcactgcctgctacatcaccacgtctggactgaccaaacccttaccttactcaac

SEQ ID NO: 62 - DNA, 400 bp, Lilium asiatic
ccgcatccgcctcaccggtcccattctagaatcacttgctaggactacttccacctacctcgacctttcccacaacaacctaaccgggccgataccaccttcctttgcttccacatctgtccaggtcattgatttctcccgcaaccgccttgccggagatgcctcgcttctgttaggcgccaagaagccactacagaatcttgatttgtcaaggaatttgttcgagttcgacctgactaatgtggtgtttccggagaatctgacgactctagatataaaccacaacaaaatctatggaagtattcccaagcagattacagaactgcaggtgctgtacttcctgaatgtgagctacaacaggctctgcggcgagattccgaagctcgagcggtatgatcag

SEQ ID NO: 63 - DNA, 427 bp, Lilium asiatic
  modified_base (367)..(367): a, c, g, t, unknown, or other
aagtgtttggggctcaaatgggtttatgtgataaggatattgttgccctgtctggtggccagacactgggactctgtcacaaggaactgtcatgttacgagggagcatggacaccaaaccctcttatctttgataattcgtacttcactgtgcttttgggtggggagaatgaaggccttatccagcttccttcagataaggctcttctggctgatcctgctttccgacctcttgtggaaaaatactctgctgatgaggatgctatctttgctgattatgctgaagctcacatgaagctttctgagttggggtttgctgatgcctgaggagaaaagaggcaagtgtgttagggaagacattttgtttntgacgctctggtaaaattgggtgcttactttagacataaagcagaatatgttcaagcgca

SEQ ID NO: 64 - DNA, 462 bp, Lilium asiatic
  modified_base (420)..(420): a, c, g, t, unknown, or other
cggacgcgtgggctacaaccgcgggaaacagcctgcaggaatccagttctggcaggcgcaggcgcctggcccgcagcaggagcatcatctcccgaaccctaaccctaaccctaatcttagttatcaaaagaagccagtggcgatgcttgatgccttcggcatcagcggctacgccacctgtcaggactgcggcaaccaggccaaaaaggactgcatccaccgccgctgccgtacctgttgcaagagccgggggtacgactgctctacccacgtcaagagcacctgggtccccgtcgcccgtcggcgagagagacagcaattctccggcaccgctgcagcagctggctcgtcagcctgcaccttcgcaccgaagaagccgcggctcatcagctcgcagactacaaccaccactttcacctncaacactacgcctcgcagcacgagcttcagtcaccaagatgc

SEQ ID NO: 65 - DNA, 435 bp, Lilium asiatic
cccacgcgtccgtccacgcgtccgttcaagttcttttatgacattaaagatcttgggaatttgagggctaatccggattacaagggtgtatgccatgttgctcttgcccaagaaggtcattgtagaccgggagaggtattactgggcacagattcccacacatgcacagcaggtgcgtttggtcagtttgctactggaattggcaacactgatggaggttttgtcctgggtactgggaagcttctacttaaggtaccccctaccttgagatttgttttggatggagaaatgcccaattatctgctcgcgaaggatttgattttgcaaattattggtgagatcacagtttctggtgcaacatacaaatccattggagttttgtggctctgtcattgagtgttaaatatggaagaagctatgacattgtgcaacatg

SEQ ID NO: 66 - DNA, 347 bp, Lilium asiatic
gctcggctaacggaaaaatggtgaagggctcagggctagctcgtccgattgtacgttcgtggaacgagtctcggctactagcgatcgaagtcgaatcattacgagacacctagcttattcaaatcgagtgactgtactcagtgacgcgttatctcttatcggaccaatttctaatttcattttaatcattactacctttcatgatgcaagttttgcatacaacataagactttgtgttgctcctttagatacttgcaaggcacctttaaagagttttattactgttgttataatctgtgcttctattgttggtgtgtgtataattatttttattgttggattttgtt

SEQ ID NO: 67 - DNA, 448 bp, Lilium asiatic
cgatgcaatccgaaaagcttgtgcatctcttgaatcaaactatcagccaccagtaacatttgttgtagtccaaaaaaggcatcatacaagactgttcgcgagtaaccacaaggacaggtctagaacagacaagagtggaaatattttgcctggcacagttgttgattcaaaaatatgtcatccgacagagtttgacttttatctatgcagtcatgctgggatccagggaacaagtcggccggcccattaccatgttctctgggatgagaataatttcactgcagatggactgcaatctctgacgaacaatctttgttatacatatgcaaggtgcacgcgctcagtatctgtcgttcctccagcatattatgctcatctagcggcatttcgcgcacggttttatgtggaacccgatactcgagagaatggctcattcaacagtagtgta

SEQ ID NO: 68 - DNA, 283 bp, Lilium asiatic
ctgacgcgtgggctacaacacgcttacacatcctgcatgaatccagttctggcaggctcaggggcctggcccgcatcacgatcatcatctccctaaccctaaccctaaccctaatcttagttatcaaaagaagccagtgtcgatgcttgattccttcggcatcagcggctactccacctgtcaagactgcggcatccattccaaataggactgcatccaccgcctctgccgtacctgttgcaagagcctatggtactactgctctacccacgtcaagagcacc

SEQ ID NO: 69 - DNA, 459 bp, Lilium asiatic
ctgacgcgtgggtccttgccgagatcaatgttctaaaggctaaactcggatcctaagaaaggcggatcatatcactagagtctgacatcaaaaacaaagacctcacggaagaggagcctccagtcttgatattctaccaggatgggccagctgacagcgactcgagcgctgtcctcaacgatgacactcatccagtggcatcaacactagttgattcgaaggccacatcaattgggtttgccttcctccacaatcaattgatgaatgcagaggagcatgattttgatgagccttgcagcaacttctttgctgatgagcatgctccgacactcccatggtgctattcggatcattggaattggatggatgatggtggagagcatgacattagcaaaaaggactgtgccttttgagaagattgaactttatgtttttgaatttagattcaacgggatgtta

SEQ ID NO: 70 - DNA, 170 bp, Lilium asiatic
tcttccacaaacgctttaatcattcaccagatcaatgttccaaatactaaactcatacccaatgataggtttatcttatcactatagtctgacatcaaatacatatacctcacttaagaatatccattattctttattattctactaaacatttccaacttacatatact

SEQ ID NO: 71 - DNA, 312 bp, Lilium asiatic
tcttacgcgtgggtccttgccgagatcaatgttctaaaggctaaactcggatcctaagaaatgctgatcatatcactagagtctgacatcaaaaacaaagacctcacggaagaggagcctccagtcttgatattctaccaggatgggccagctgacatcgactcgagcgctgtcctcaacgatgacactcatccagtggcatcaacactagttgattcgaatgccacagcaattgggtttgccttcctccacaatcaattgatgaaggcagatgagcaggattttgatgagcactgcagcaacttctttgct

SEQ ID NO: 72 - DNA, 486 bp, Lilium asiatic
  modified_base (372)..(372): a, c, g, t, unknown, or other
cttgtgtgttttttttagaaggcatctaattattcaccaggtcattgatacgaataatatccaatgaccaaatacgttgtctatgtgatccatgtaaagtaaaaagagttgttttggggaaaataaaagaaagaacttgttcttcttccgtaaagaactcttctaaaaatcccaaacctaatctttgcaaaagagcacgtgccgtacttttattcttgtagttctctcaccttcgataacgatgtcttcttgctgtggtggaaagtgtggctgcgggtcttcctgcaagtgtggcagtggatgcaatggatgtggtatgtatcctgacttggctgaggggagcactgcctctaccactatgatcatggggtntgctcctgctaagggggagtttgaggggtttgagatgtatgctgagaatggtggctgtggctgcaagtgtggtgataactgcaactgcaacccctgcaagtgtggcaagtgagc

SEQ ID NO: 73 - DNA, 333 bp, Lilium asiatic
  modified_base (119)..(119): a, c, g, t, unknown, or other
attctccggtgtcgactccacgtcgtctcgtgcctaaactcctaactcctaagtttctcgtcgatgaatggtagtcaagtccgagtgaatcgcactcgtcagagcccgatgacaagctngggggctaagctggaagggtctcctacaaggtgagcaggcaggtgaagcgtgccaaggctggcaaggaccccaacgcgccgaagcgtcctccgaccgcgttcttcatcttcatggatgatttccgcatggagttcaaggagaagaacccgaacaacaaatctgtggccactgtgagcaaagctggtggtgacaagtggaaatcaatgtctgatg

SEQ ID NO: 74 - DNA, 375 bp, Lilium asiatic
  modified_base (326)..(326): a, c, g, t, unknown, or other
aacaaagttgcatcgcctgtaagtgttttggtcaggaaagagaacaacattgatttgatggccaaagattttcaaaagctggtgtcaaaattttctctagcgggttttgttgtcggctatccatttgccttgagaggtcaaaatagtatagaggcagtgcctgtgagacttttcatggaggaacttcgcaagaccgagaaactcgatggactgagatacgcgtattgggacgaaaactttacctcaaagtgcgtggaagccctgttggagcctttgaatctgcatccggtagagtgcaaaacaatccttgacaaatttgctgctgntggaatactccaagggtacttggacaacatgaatcggattttgaaagtc

SEQ ID NO: 75 - DNA, 378 bp, Lilium asiatic
tctcaacctcctcaccggtcccataccagaatcacttgctaggactacttccacctggctcggccttttccacaacaaccgtaggggggcctctaccaccttcctttgcttccacatctgtccaggtcattgatttctcccgcaaccgccttgccggagattcctcgcttctgttaggcgccaagaagccactacagaatcttgatttgtcaaggaatttgttcgagttcgacctgactaatgtggtgtttccggagaatctgtctactttagatatttaccacaacaaaattctatggaagtattctcaagcatattactgatctgcttgttctgttctttcataatgtgttctacaactttcttttctgctagatt

SEQ ID NO: 76 - DNA, 420 bp, Lilium asiatic
ctctcatataacaatttttcaggcgaaattccagtcctcctatcgaattgtacatacctaaatgttcttaatcttcagcataaccagttgaccggccagatcccgggtcagctaagtatgctgactcgtctgactagtctcaatgtggccgataatctcttatcgggaccaattcctaatttcagtagaatcaatactacctttcaagaggcaagttttgcaaacaacataggactttgtggtgcgcctttagatacttgcaaggcacctcgaaagagtattaatactggtgttataatcggtgctgctattggtggtgtggtcataactattttaattggtggagttgttatattcttctggttgcgtaacctacctattaagatgaaggagaaggatgtcgaaaacaaatgggcaaag

SEQ ID NO: 77 - DNA, 417 bp, Lilium asiatic
gtggcaataaatccgtagaggttgcacatcatcaagtttaagcttctagactgtcaacatttgcgatcatatctaatgaaggtgggtacactgacaaggtaccgacatctgaaaaaagtctaaaatcacgtgtaatactagttaggcctagtattaatgtaatatctactgatcatgatgttatacctactttataatctgtgatgaccctgtacttactgtatattctacttgtaatcctattttgttattctatctttttttttgttctagttattattcttttcaatatctatattatatttttttctaccttttttatattattttttttgttttttattattattttatttttatttttatattttttctttttatttattttttttttttttttatattttattattattt

SEQ ID NO: 78 - DNA, 483 bp, Lilium asiatic
ctctttcttggttcggagtcaatggcggcagcgaggctcgggtgatgatcggaaagtctccggcgttctcgatctcgtcacagccatggccgcaccgtcgttcaacacaccgtttcagccctatgtttatcagggcccacaaggagacaaaatgccttttcagatattaggcggagatgctcaaatagttcagataatgttgaattcacaagagaaggtgactgcgaagcctggtacaatgtgttacacatctgggtctgttcaagttgaccacatatatttccctgaacatgaatggggaatgtggcaatggctttttggcaagggtgtggctagcacagtaatgttcaacactggttctgatgtaggttttgtcggtatttcggcaccatcccctgcaaggattatcccgattgatctggcaaactttggtggagaaattctttgccagccagatgcatttctttgctctgtcaatgatgt

SEQ ID NO: 79 - DNA, 456 bp, Lilium asiatic
gcctgagctctccgccagagctccgccggtctccacctccgcccatcttcgactcgagcaatggctaccaaatcttcaccagaacaccaactccttcgcctctgtccattcccaccatcaatttcagtcaattcccactccaacagtacgaatgatcaattctagttcttaatctccaacggatctcccagaaatcatcttctccagcaacccactcaccttcaagcacctccagagagatcatggatatatcaagaattctcaatcagagagggtaatgttcgagttctcctatgtagcaaataaagatataaaccagaccgaatgacatttctttgagtgctttcggcttgagctgatctgacctcattgaagctagggataagttgcaaatgatgtttaataaggatgagtggcatgatatctcgtggaattcttagatttcagcacttgatc

SEQ ID NO: 80 - DNA, 263 bp, Lilium asiatic
actctctttcctggttcccagtcaatcgctgctttcatgctccggtgatcatctaatagagtagggtctcctaaatctcgtcacaggcataaccgcaccgtctttcaacactacccactaatccctatatttataaggtaccacaacgatacaaattaccttttcatatattaaacctagatcctcaaatacttcacataatgtttaattcactcagataaagttactaccaaccccgttgcaatcatttacacatctagatt

SEQ ID NO: 81 - DNA, 388 bp, Lilium asiatic
cggatgaacattggcagccggccgtcaaagctgaaaccaagtggaggaatagagtcactacgtgcaattccatggatctttgcatggactcagacaaggtttcaccttcccgtatggcttggtttccgtgcagcatttaagcatgtcttggagaaggatatcaggaatttgcatatgctacagactatgtacaaggagtggccatttttcatggtcacaatcgacttggtagaaatggttttcgcatagggtgacccctgcattgctgcattgtatgataaactattggtgttccaagacctatggtcatttggtgagcagcttaaggccaactattaagaaacaaaacatttacttcttcagggttgccggtcacaaagaccttttg

SEQ ID NO: 82 - DNA, 486 bp, Lilium asiatic
caaagctccccaagctctcccacaacgagcctctcctgaagatcaagaagctctccgacaaggcggtggtgccctcccgagcgtctgccctctccgccggatatgatctctccagtgctgtggagactaaggttccagctcgaggtaaagctctggttccgactgaccttatcattgccatcctttatggtacctattctcgctattcgtccttgttttgttattcatttttttctcttttttgttatctatcttttatttttctttattttttcttttttttatattctcttatttttttttttatttttatttatttgatttgttatttcattatattttctatttctttttattttttttttttctttattttatttttctattctttttattatttaattatttttttttttattttttatatctttattctatatcattcttattatttttttttattatttatctatcttattttttata

SEQ ID NO: 83 - DNA, 353 bp, Lilium asiatic
atcaattgtcctactaacttatacactcacaaagggctcaaaccgcctcgaaatccttggatggatttgtgtcagcttctctgttagcgttttcgcggctcctcttagcataattaaacttgtaatcagaacaaggagcgtcgagttcatgcccttctccctctcctttttcctcaccttgagcgcagttgtttggttcacatacggccttctcaccaaagacatctatgttgcgattccaaacatactatgcttcagcttctgagtcgctcaaattgtgatttacatcatctacaaaagcagtgcaaagaagatgactatcgtgcaaggtgagcgactgccctagcatgttg

SEQ ID NO: 84 - DNA, 312 bp, Lilium asiatic
gtcgacttctgatctgaaagactcgattgatatgatatacttctcgcccaactctgctaaggaatctgtgggggatattcagggatcaaccagtagtgagaattcagttgttattcctgaagttccgaagcatgttgtgaacgccttttccttgctacaagggagccctgaagctcataatgttgttgcatcactggcctccgataagaacgtttgggatgccataatgaagaacgacaaggtcatggctttctacatgaatcaggaatcagccgtcctctcccctgaaagatctgctgatcctgaaaagtc

SEQ ID NO: 85 - DNA, 312 bp, Lilium asiatic
ctcacccgtggatccgtattcaactcgtatctattaatacgcttaagcctgaacatgtaaaggcagaggtgcatagtcaatttgctcaggaagtttatattatgaggaaggttcgccataagaatgtcgtccaattcatagcgtcttgtacccgacccccaaccttgtgtattgctactgagtttatgtcatgttgcatagtttatgacaatcttcataattcataatggcatttttagtcttccagtcttacttacagtatccattttatgtttctaacggaatgaactactagcactaataatattatct

SEQ ID NO: 86 - DNA, 485 bp, Lilium asiatic
  modified_base (451)..(451): a, c, g, t, unknown, or other
gcttccagaaccacactctcttccataaggctctcaaagaggcttttgaggttttctgcaacgagggtgttgcaggtagttcaagtgcagaacttttggctatgttctgtgacaatatactaaagaagggtggaagtgagaagctaagcgatgaagccattgaggaaacactggagaaggtcgtaaggttgcttgcttatattagtgataaggacctttttgctgagttttacaggaaaaagcttgcacggaggttactgtttgataagagttccaatgatgaacatgagagaagtattttaaccaagcttaagcaacaatgtggagggcagttcacctcaaagatggatggaatggtgactgatctaacactggctagagaacatcaaacgagctttgaggagtatcttaacatgaacccacatgcacattctggaatcgacctaactgncactgtcctaactactggattctggccaagttat

SEQ ID NO: 87 - DNA, 328 bp, Lilium asiatic
agctgttcagcctcctcttctcgaataaggatatgctgatcctcatggtcggtctcgattcggccggtaagactactattctgtataagctcaagctcggagagattgtcaccactatccctactatcggattcaatgtggagactgtcgagtacaagaacataagctctacagtttgggatgttggatgtcaagataagatcaggcctctatagatgcactacttccagaatacccagggtcttattcttagtgtggacagcaatgacaggtatcgggttgtttatgctagggattagcttcacagaatgctcaacgaggatgattt

SEQ ID NO: 88 - DNA, 313 bp, Lilium asiatic
cggacgcgtggggatatttcaaggaccactctaactgttgtgtgattgatccaattaataatgtataggctatgttggatcgccacaagatgcaacaaattctacttgaattacagaacgcatgcatcaaaggtcgccagagactacgggcacctcattttctaaaggttgataatttctgtgaggctaatttattggaccaactatcggatgctaaattatcttttcctgttattgtcaaaccacaagttgcttgcggagtagctgatgctcacaatatggcattagtatttaagtttgaagattttaggga

SEQ ID NO: 89 - DNA, 231 bp, Lilium asiatic
acgctccgtcaaggccagaggaattgcgatattatatattccctaagctcatatgatcatctctggaatagagcttatcatagatcctgctagatatcagccatgtgggcttattcaacttaatagcatacaatatgggatgccagacatctgttctaccacagatagatcttgtagacacattgaaaggaacgattcactgtattccacatggacaccttcacatgcaat

SEQ ID NO: 90 - DNA, 399 bp, Lilium asiatic
gggcacatgttctttcaatcacgatgtcgatcattctcatgtagcaacgtcttcgatcccttctcgctctacgtctttgatccatttgagggcttctggttccccttcttcggcgcccccaccgccctctcccgttccgctggttccggtgagaccttcgtcttcgccaacacctgcatcgactggaaggagacccctgaggcccatctcttcaatgccgattctgccgtttgtgattattgatgatcgtattctttatgttttattttttttttttttttctttctttttctttgtctttatttgttctctttattttttcctcttctttttttttctttttacttatttgctttttttttttttcttttttattttctttttttaattttattctat

SEQ ID NO: 91 - DNA, 195 bp, Lilium asiatic
ctcacgcgtggtctcggcatacctctgacttttaaccttttactagccgacaccatctattggttgaaggatcataatagcatgtctgagaatgtgatcaccgaattccataccaccaaaaattttcaagagctatcgtcatctatagtttctcaatcattcgttgttccttatttgtcattcaattctattgat

SEQ ID NO: 92 - DNA, 440 bp, Lilium asiatic
gtatctctatcaaccataagcaaaagcactgtgctcataaatcctgatctccctgagtcaaagaagctcaagtcttggtatgaatctgagggcaagggcacctcaatgtcaatggttggagccaacttggtctcagcaaaaactggttctaggtctgtgtacactgagagggtcaccctgtctcatattgtcaatgatcaaacattgggtcaagataagcctgcattcttcagtatcagtgttaatgtcagcctcatcaagtcagaccagtcactttggtacccagcttgcaacacctgcatcaagaaggtgacccaagctgttgagtctgggtactggtgtgagtcttgccttaagaatgttgattgctcattgagatatgcattgtcctttaaagtatcggatcacactggtgaagcttggttgactgcttttaatga

SEQ ID NO: 93 - DNA, 487 bp, Lilium asiatic
caaagttctatatcatcaaatcatacagcgaggatgacgttcataaaagtatcaagtatggggtttgggcaagtaccccaaatggaaacaagaagttggagggggcatacaatgaagctcaaggaatggcaggcgaatgccctgtctttctgctattctctgtgaataccagtgggcaatttgttggtctggctgaaatggttggtcaggtcgattttgagaagactatggactattggcagcaggacaagtggtttggctgcttcccggtaaaatggcatattgtgaaggatgtacccaacagcattctgaagcatataacactcgagaacaatgacaacaagcctgtaacaaacagcagagacacccaagaggtgaagctcgaacaaagtcttcaggtactaaagaatttcaaggaacatgtcagcaagacatctattttagatgattttggtttctacgaggaccgtcaaaagatgatgcaaga

SEQ ID NO: 94 - DNA, 460 bp, Lilium asiatic
gcgacacataacagtggactggattctactcgtttatacctatttataccgacctagccaagaagcacgaccaccactagagaaggaatggcgagcaacggcaagttggtgtgtgtgaccggcgccttcggctacatcgcgtcatggctggtgaagctcctccttcagggcggctacaccgtcaacgccaccgtccgcgacccagttgatccgaagaaaacggaacacttgcgtgcacttgatggagccagtgagagattgcatttcttcaaagcaaacttactagatcagggatcgtttgatgctgtggttgatgggtgtgaatgcgttttccatacagcttctcctttttattatggtatcacagactcacaggccgagttgattgaccctgcattgaatggaacactcaatgttttgggttcctgcaccaaatcttcttctattaaaagggtggtag

SEQ ID NO: 95 - DNA, 135 bp, Lilium asiatic
tatacacatatcatttcacatgcttctacttttttatccttattaatactaacctaggccgggtccactcccaccaccagcaaagtaacaacaagcaacatcaacttacaattaagaacaactactccatctaca

SEQ ID NO: 96 - DNA, 464 bp, Lilium asiatic
cctctatcgctcttttgatcttcgcattccttctagtcgactgttcaatggcaggggagatcgcagaagtccggcaacggcgaggccgccgtccacatcgtctacgttgaccgcccggagggcgaggaagccgaggctttccacatcaaggtcctctcctccgtcgtcggcagtgaggaggccgcgaaggaggctgttgtctaccactacacgcatgccgccagcgggttctctgccaagctgactccgaaacaggttgccgatctgtctgagaaaccagaggttcttcaggtgcaggccagcaaaacctatcagctgcatggacaaggagcgagtgttgggggcgtacgctctttcgtcctgtaagctttggaaagctgctcctgtgccatgaaaaccctgctcttaagtgttctgtctgtgcggtgaataaagtgaaattatggaatctcactcatatgtac

SEQ ID NO: 97 - DNA, 472 bp, Lilium asiatic
catagccagaatggcgtgcactgatggacgatatggctgacggtgcaactaaagatgacagagcaattgtctttcaagaaccacgctttgttgagtactttcgccttgccactcctgagttggaatatggcaggatgaacattggtagccggccggcgaaacgaaagcccagtgggggcatcgaaacactacgagcaattccatggattttcgcatggacgcagacaaggtttcatcttccagtctggcttggatttggcggagccttcaagcatgtattggagaaggacattaagaatctccaaatgttacgcgagatgtacaatgagtggccattctttagggtgacgatcgacttggttgagatggttttcgctaagggagatcctggaatagctgctctgtatgacaaattgctggtgtctgaagaactgcagtcatttggggaacgactcatagccaactacgagga

SEQ ID NO: 98 - DNA, 458 bp, Lilium asiatic
cggacgcgtgggctcggcatacctctgactacaaaccctttactagccgacaccatcgattcggggaaatatcagaatagcatctctgagaatgtgatcaccgaattccataccaccaaagatgttcaagagctatcgtcatcgatagtttctcaatcgttcggtgttccggatttggcattcaattctattgattcagctattgaagatgccagtttgttgaatacaagctcgtgggcaccagcaccaccgtttcagcgaatgcggacttacaccaaggtgtataagcgaggagctgttgggcgatcgatagatatgtcccgttatttagattacgatgagttaaaacatgatcttgcccggatgttcagcattgagggacagcttgaagatcgacagatgtgtggatggaaactagtatatgttgatcatgtaaatgatgttctacttgtgggggt

SEQ ID NO: 99 - DNA, 219 bp, Lilium asiatic
cgtattattcaaccatgctagattactttagcaacatcatcatgttgacaaaacctgtctttattacagtctgatcttatacaactattctgactacattaatgcctatctaaagcttgcaacaatatcctaatcactgaataatataccactaatcattgaattgattgaggatgcccttaatgacaatgacaagtgctccaaatctattcttattct

SEQ ID NO: 100 - DNA, 133 bp, Lilium asiatic
agcggctccaatggcggacgacgactacaactatgatatgggatacgaggacgagccaccggagccttgtattgatgatgggattgaggaggaggatgatgctgaaaataacaatgatagatgttggtgatgt

SEQ ID NO: 101 - DNA, 323 bp, Lilium asiatic
gactgacgagtttggatccgggtatgggaggaagccggagacagactatggatccgggtatggtgtgggacctagtcatcggcaggagccgtcctatggagagcctgggtatgggggtggtgttcagccagggtatgggggtcagcgtacccgtcttgccaatgatgctaaagccgcaaagaaaggtggatgaagacagttcaatggtcttattgatgtgcataaaaagactttagcttctgatgggattgctggactatatcgcggcgttaacatctcatgtgatggaattatcgtgtatcgaggaatggacttctgaatgt

SEQ ID NO: 102 - DNA, 447 bp, Lilium asiatic
cccggacatggcgagaggaattgcgaaattcaatattcccttagctcatatgatgatggctggaggtgatcttatcataggtcctagtacatttgagccatgtgggcttattcaacttgaaggcatgcaatatgggatgcctgtcatttgttcgaccacaggtggtcttgtatacacagtcaaggaaggattcactggattccacatgggcgccttcactgttaattgtgaagctattgatccagtggatgtggtggcgactgttaaaactgtgaagaaggctcttaaggtctatggaactcctgctttcagcgaaatggttcagaattgcatggctcaagacctctcatggaatggacctgctaataagtgggaagaattgctccttgatctataagttcatggcatctaaccatggattgactgataggaatttgctccttatgt

SEQ ID NO: 103 - DNA, 306 bp, Lilium asiatic
gagtagctcattatagagattggctcttgtaaactctattttgtaactctttttaggagttggcaaaaataaataataataaaattgaattgagatgatagtgatgagtttttttttggaaattatgtgttgagagactaaatgtgtgttcaagaagtatagtgagtcgctctgtctagaggacgactctgttgtcgtacccacttttaatagggtgagatcgtatttagtctctcctcgaaataaaagactaatcaccttactcgcatatggatcatagtgtttagtgttagcttgtgttttttg

SEQ ID NO: 104 - DNA, 481 bp, Lilium asiatic
  modified_base (471)..(471): a, c, g, t, unknown, or other
ataaaggtccagaagctcgtcctcaacatctccgtcggcgagagcggcgatcgcctcaccagggcctctaaggttttggagcagctgagtggacagactccggtgttctcgaaggcgaggtacactgttcgatcttttgggatcaggcgtaatgagaagattgcgtgctatgttactgtgaggggggagaaggctatgcagcttttggagagtgggttgaaggtgaaggagtatgagttgctgaggaggaacttcagtgatactggttgctttgggtttggaatccaggagcatattgatcttgggattaagtacgatccctccactggtatttatggaatggatttctatgttgttttggagcgtcctggatatcgtgttgggcgccgtcgtagatgcaagtcccgtgttggtattcagcacagggttaccaaagatgatgccatgaagtggttccaggtcaaatatganggagtgattc

SEQ ID NO: 105 - DNA, 458 bp, Lilium asiatic
  modified_base (209)..(209): a, c, g, t, unknown, or other
  modified_base (376)..(376): a, c, g, t, unknown, or other
  modified_base (385)..(385): a, c, g, t, unknown, or other
cagatacagagagcagattaagaagaccagacctggacctgcacaagaagctgtgaaagctggagccatgagggtcctcaagcaaaagcggatgtacgagggacagcgtgatatgctatacaatcagacttttaacctcgaccaagtcggttttgcagcagagggacttaaagatgctcaacaaactatgacagctctaaagtccgcanataaggaactgaaaggaatgatgaaaactgtcaagatacaggacatagatagcttgcaagatgaaatgatggatctcatggatgtgagcagtgaaatacaagagtctctgggtaggagctacaatgtacctgatgatattgatgaggatgagcttttgggtgagctngatgctctngaagcagatatgggagcagagactgagtccgatgcggttccttcatatcttcaacctgataaggaatctgatt

SEQ ID NO: 106 - DNA, 471 bp, Lilium asiatic
gagcagcacttgaagccaaataccagaagttttatgaacctttatacaccaagcgatgtgaaattgtgaatggtgtggttgaagtggaaggtgtaacaattgaagcaactgatggaaattctgctgaagagaaaggtgtgcctcatttctggttaaatgcactgaaaaccaacgaagttcttgctgatgagattcaagagcgtgatgaaggagctctgaagttcctcaaggacataaaatggtgcaaaatagataatccaaagggtttcaagcttgagttttacttcgatacaaacccttacttcgagaattctgttctcacgaaaacatatcacatgattgatgaagatgatccaattctagagaaagcaatagggactaagattgtatggtatccaggcaagtgcttgacccagaaaactattgtaaagaagccaaagaagggatctaagaatactaagcccatcacaa

SEQ ID NO: 107 - DNA, 302 bp, Lilium asiatic
agcagcacttgaagccaaataccagaagttttatgaacctttatacaccaagcgatgtgaagttgtgggtggtgtggttgaagtggaaggtgtaacaattgaagcaactgatggaaattctgctgaagagaaaggtgtgcctcatttctggttaaatgcactgaaaaccaacgaagttcttgctgatgagattcaagagcgtgatgaaagagctctgaagttcctcaaggacataaaatggtgcaaaatagataatccaaatggtttcaagcttgagttttacttcgatacaaacccttact

SEQ ID NO: 108 - DNA, 435 bp, Lilium asiatic
tcgccttgcatcattctacacaaattcaggttttcagtttgttttgtttcgccacatcaccaaagggacgctaaaaagttcatgcagctggttgaagagaagaagaagagagtcctggataggaaagaggcccctttgaaatgggatcataagctcgaagctgctgccaaggcgaaagcctactccgaatccaatgagagtaaacacacgactccaaaacacaggctgtaatcctcctcttcatctgattatgacagctatactgatggcagtgactatgacaggatatcatcgaataagagtcgtatagaacacttttagcacaatcatgctgagacgaagcacatatcgaggaggagctcgcattcaatctatgtgagtggcattgatgatgtattgatgctaatccagtaatgatcgaccgatgaagatacg

SEQ ID NO: 109 - DNA, 405 bp, Lilium asiatic
gagcagcacttgaagccaaataccagaagttttatgaacctttatacaccaagcgatgtgaagttgtgagtggtgtggttgaagtggaaggtgtaacaattgcagcaactgatgtaaattctgctgaagagaaaggtgtgcctcatttctggttaaatgcactgaaaaccaacgaagttcttgctgatgagattcaagagcgtgatgaaggagctctgaagttcctcaaggacataaaatggtgcaaaatatataatccaaagggtttcaagcttgagttttacttcgatacaaacccttacttcgagaattctgttctcacgaaaacatatcacatgattgatgaagatgatccaattctagagaaagcaataaggactaaaattgtatggtattcaagcaagt

SEQ ID NO: 110 - DNA, 433 bp, Lilium asiatic
cggacgcgtgggcggagattggtgtattgtttgtgactatgttatgaaaatgaacatcgagtagtcgctagtcaactccagaccgatccaactagcctattaattgattaatgcattatgcatcatactttaatgcatttattttatttttgctttcaaacaataaggacttgttgatattggcttatagtgtggggtttgtcccacttaatatatgttcaaataaatgagaactcaagccaagtaataagttgggctagtcaaacccaacaatcaattttaaagtcagattattattcataaaatattattcactgtgaacggtacatatgaacattaaagtgaacactaccgtcaaacattaactttttgaacttcttccggtccaaaaacatttttctctttattaatggaatttataacttttcctttt

SEQ ID NO: 111 - DNA, 426 bp, Lilium asiatic
atgtggagcaaacctatgctagcattctagtaaagcttttgcgtcattggcaagcccgggatcatccctgtctagctcagagcaaacattcagatacagttgagaagcactcctttgatatggcaaagcaacgtacctcgagagatgctcattgccaatgtggggcgtgtgcagcgatacgccagaggatgcagttgagacgatgtgtggtcatgtattctgctatcagagtgtgtccgacactctgactggcgactacaaacagggtgcacagatctgctgcatagaaatgctcagcaccgacattgcattcactcaagctactttgagaagatgtatttgcagcaattctgataacaatggcgcatcaaagatccgcctgcaagatatgcgaaaagaaacctttcagtcacacatactaccttt

SEQ ID NO: 112 - DNA, 425 bp, Lilium asiatic
cggacgcgtgggcggagattggtgtattgtttgtgactatgttatgaaaatgaacatcgagtagtcgctagtcaactccagaccgatccaactagcctattaattgattaatgcattatgcatcatactttaatgcatttattttatttttgctttcaaacaataaggacttgttgatattggcttatagtgtggggtttgtcccacttaatatatgttcaaataaatgagaactcaagccaagtaataagttgggctagtcaaacccaacaatcaattttaaagtcagattattattcataaaatattattcactgtgaacggtacatatgaacattaaagtgaacactaccgtcaaacattaacttctgacttttctcccgttccaaaaacaaatttctcttcattattgggaatttataact

SEQ ID NO: 113 - DNA, 438 bp, Lilium asiatic
gtggataacctttctagaggagatatgggggcagttgatgtcctggaagatttatttccggagcctgggagacttcaatggatcatagctgatttacgatatgcgaaagctcgtatccgcatatttgcagaaaatgcattcgatgccgttatgcactttgcagctgttgcttatgtggctgagagtacgctggatcctttgatgtactaccacaacatcacgttaaatacattggttgacctcctggcgatggcagctcatggagctaaaactttgatttactacatcacatgtgcaacttatggcgaacctgataaaatgccgattacagagacaactgctcaggtacctatcgacccatatgggaaggtcaagaagatggacgcatgatattgcatgttggatttctctgacgagtcaaatattgacgtcatgatt

SEQ ID NO: 114 - DNA, 280 bp, Lilium asiatic
acgcgacccgtactctgcatatcggagaattggaccggactctgggctgaaaatgaacctggaggcctcgctggccaactccgaacacggcccaactcacctaccaattgaataatgcattatgcataatactttaatgcatggattgtacggttgctttcgaacggtcaggactcgcagatattggcttatagagctgctggttgccccacttaacatactgtgcaactcaaggagaactcgtgccgagtagtatggtgatctagtcaaacccaacaat

SEQ ID NO: 115 - DNA, 162 bp, Lilium asiatic
tcgctgtgaagcataactatgctagcattctagtaaagcttttgcgtctttggcaagcctgtgggcatgcctatattgctcagaaaaaacattcagatacagtatagaagcactcctttgatatggcaaagcaactaacctgagagatgctcattggcaatt

SEQ ID NO: 116 - DNA, 306 bp, Lilium asiatic
cagacaaaaaacaggcaacacgaaaaaaaacaaacgacaaacacaacacaaaaacaaacagagaagaaaacagagacacagcaaaagaaaagcaccagacacaagaaccaacaaaaagacaaagacaccaccagcacccaaaacgacaaaacgaacaaaaacaacacacaccacaaaacagagccaaaaaaacacaaagaaagaaaaaaacggaacagaaaaaaaaacaaaagacacaacaacaacaagacaaaaacacaccagacaaaaaacacaggaaaacaaaccacacaaaaacacaacaac

SEQ ID NO: 117 - DNA, 359 bp, Lilium asiatic
gccgattaagaactttgattgttctgcatccagggatccactcttatttgttggtcacctaggagagagttctctattggccattgaaaagcgctggatggatgtagtgaatagtttctacgcacctgttcatagacatatatttgggacttatgtccagcatatttgcttcatggatacctgttgacatctggagtcagtgatgcgctatacagaagtgtttcttacagaatcatgatggaagagagtggatgttattattcagatctcacttgggaagaggggatcctatgttgttcaagtgagccagttcacggtagactgtccatatactcaatctagtggactttgacgctatt

SEQ ID NO: 118 - DNA, 424 bp, Lilium asiatic
  modified_base (414)..(414): a, c, g, t, unknown, or other
cacaaagaacgcaggtgagatcatcgctaaggctatttttggcctcggccaagaaaagggcaagaaaggatttcacaagctccaactcatgcaatcgatgatcttcaaatccaaccgcttgatcggagtacccttcagaaagatgctttgccccaggcaaagctacagtgaatggaagcttgggaaggaaattgacgaactcctcctgtccatcataaatactcgcaaacaagcagctagcaacaatactggtgatagtcaacagggtctattaagcttactgcttgctgcgaatcagaataatgcgcagttggagaggaagctaacgactcgggagctggttgatgagtgtaagacgttcttcttcgatattcaatattgggtgtaatatcactaaattaatataggatgctntcaagatcca

SEQ ID NO: 119 - DNA, 449 bp, Lilium asiatic
  modified_base (317)..(317): a, c, g, t, unknown, or other
gtgggctgtgggagagggcaaaacggaacgtcaaagccgcatagtactgttagcgaaagatacgaaggttgtcagacggcgatgaccacactaaaataagcaacacgccgaagtctgctctctcttctgcaggcatcacagatcgagttcaagagcaaccgagatcgctgttgggagttaactttggattagagaaggaattatgttccggcgaaagcagaatgttcatgataacaaggagcatgatgctggatacatcgtagagaagattgttgagctgaaagctgcaatcggacccttgtctggacgcgacttanagtactgcactgatccgtgcctaaagcgatatttgaaagcgcgtaactggaatggtgccaaggctaagaaaatgttggaagattcacttaaatggagatcatcttacaagccagaagatattcgctggcatg

SEQ ID NO: 120 - DNA, 427 bp, Lilium asiatic
ctgtgaagcaaaactatgctagcattctagtaaagcttttgcgtctttggcaagcctgtgagcatccctctctagctcagaaaaaacattcagatacagttgagaagcactcctttgatatggcaaagcaactacctcgagagatgctcattgtcaatttgtggcgtgtgcagcgatccgccagaggatgcagttgtgacgatgtgtggtcatgtattctgctatcagtgtgtgtccgacactctgactggcgacgacaaacagtgtccacagatctgctgcaaagaaatgctcagcaccgacatcgtattcactcaagctactttgagaagatgtatttccagcaattctgataacaatggcgcatcaagttcggctgcaaatatcgaaagaaccctttaagcacacattctaccttgtctctttc

SEQ ID NO: 121 - DNA, 334 bp, Lilium asiatic
gtgtgaagcagaactatgctagcattctagtaaagcttttgcgtctgtggcaagcctgcgatcatgggtctctagctcagaaaagacattcacatacagttgagaagcacttcttagatatggcaaagcagctacctagagagatgctcattgtcaatttgtggcgtgtgcatcgatccgtcagatgatgcagctgtgacgatgtgtggtcatgtatactgctatcaatgtgtgtgcaacactctgactggcgacgacagacagtgtccacagatctgctgcagagaaatgctcatcaccgacatagtgttcactctagcgactttgggaagat

SEQ ID NO: 122 - DNA, 296 bp, Lilium asiatic
acgctgtgaatcataactatcctcacattctacttaagcttttccgtctttctcaagcctaccgtcatgcctctctagctcagaacatacattcatattcacatgagacccactcctttcatatgaccaatcttctacctctaaagattctcactgtcaatttctctcatcatcccctacccaccactaagatcacaaatcactatatctcaccatctaattctccttccaaactcttccacactcttactttctactactcacattatccactagaactacttcttataaattct

SEQ ID NO: 123 - DNA, 287 bp, Lilium asiatic
gacgcacgcgtacgcttgcgcctgaaaccttttgttagatattattatgtttgacaagctaaactttgagcaggggatcttttatttgagaccattacaagtctattattaattgattgaaacattacgcttgatactttaaagcatttattttttctaaacttttatacaacttcacttttaagtattgactcattaatgtagagattcatctaattaatatatgtcacactaaataattaacataagccaattattacagttgtactaatattaactcaacattt

SEQ ID NO: 124 - DNA, 431 bp, Lilium asiatic
acgctgtgaagcaaaactatgctagcattctagttaagcttttgcgtatatggcaagcctgtggggatccctctctagctcagaaaaaacattcagatacagttgagaagcactcctttgatatggcaaagcaactacctcgagagatgctcattgacaatctgtggcgtgtgcagcgatccgccagaggatgcagttgggacaatgtgtggacatgtattctgctatcagagagtgtccgacactctgactggcgacgacaaacagtgtccacagatctgctgcaaagaaatgctgagcaccgacatcgtattcacttaaactactgtgagaagatgtattttcaggcattctgatcacaatggcgcatcaagttcagcctgcacatattccacaagaccccttcagtcacacatactacctttgactct

SEQ ID NO: 125 - DNA, 434 bp, Lilium asiatic
  modified_base (373)..(373): a, c, g, t, unknown, or other
  modified_base (389)..(389): a, c, g, t, unknown, or other
gtcctccgggacaacatccagggcatcaccaagccggcgatccgccgcctcgcccgccgcggtggtgtgaagaggatcagcggtctaatctatgaggagacccgcggggtgctcaagatctttcttgagaatgtcatccgcgatgctgtgacctacaccgagcatgcccgccgcaagacggtgacggcgatggatgttgtgtacgcactcaagcgccaggggcgaactctgtacggcttcggcggctgaagggatgaggtttgttctaggactagggtttctggtttggcttagttgttgttgggtgtctttggagtatggtagggtttgtggggtgcgacttctaagattgtcagatatcttatctgatatnggtaatggagaaaagnttttgagttaatgttttcttgtgttatctaatatgtgattaaatg

SEQ ID NO: 126 - DNA, 458 bp, Lilium asiatic
  modified_base (433)..(433): a, c, g, t, unknown, or other
caagccaatcactcaccactcatgtagttacatctcgtacttgagacggatttcagtgtgcgatctcgaagagaaacagactacgatcgcagcgctagatctgagagagatggagacggagatggggttgaagaaatgcaccgccctcatgtgccaacgaattggctgcgacgccaccttcaccgaagacgacaatccggacggggcctgcagataccacgaatctgcgccttttttccatgatggtatgaaagaatggagctgttgcaagaagaaaagtcatgatttcagcttgtttttagcaatcccgggatgtaagacggggaaacataccacagagaaacccgttacaaaagtagctgcaacttcacgaaagccagctccagttgtaactccgaacaaaaaggttgaggattcctgtccaaggtgccgncaaggcttcttctgctctgatcatg

SEQ ID NO: 127 - DNA, 431 bp, Lilium asiatic
gtttttgtcgttttatttgtgttgatgtatcaaatgttttatgagtaaatattttcattcgccaaatgtaaaattctctccccaacaaagatgtttattggactcaatgaatgtcgagcaatggtaaaattcttgctcttgaatttgaacatttgggaatgaaaacttttgttatgtaatacttgggtgtttcaggtaaagcatttatgttcttgcaatggttaaaccttatcatttccttagatatggtttaataaaacttcatctaagtttggaattttgaggcgtagttttactattgtttcaagtgtagctgtttatattgtaacttagtatagctcttttttttcttgcacgttctcgtgtaggaaatttcactattctcacttaagttgaactactaacaatatgtctgctgggtggacatgtgt

SEQ ID NO: 128 - DNA, 360 bp, Lilium asiatic
acgcctcgtttcgatctgccgaccactccgacaccgactgacactgctatctgccagcttattatgaggggatcattcaacaggatcattgatccaatctattactagacccacaaggtactcaacatccttctttacaatgtcatcctcgatgacgtgagctacatcaacctttccactgtaaagacaacgagtcacaaggagctatactttatctcccacaacagctggccaatgctctgtacagacacttcccgttgactggaagagggcacccctagacctcttcattttcccagaggttgactaacttttggatgtttgtgggcttgatatcaataggagattgcactctaaact

SEQ ID NO: 129 - DNA, 418 bp, Lilium asiatic
gcgttggtggcaatggtgtcagggataagcaatggggggactgagaagatgatgaagacgcccgaggaggagatgaagccgcggtttaaggggaactaccagtttgttatggcacaagtgatgtcagagcttcacgatccaattattgtacaatttatcgctgtagtagctggaaagaaaggtataatttgtgagagcgtctgttcagagttcaaggaactagtttcaatgtgcggaggaccgaatgagaagtggagagcacaggaactagtaaaacatctcttgtgaaggtcttaactcgacattgaagatacctatgaatttcagatgtctcattcaaccgattgagatttgctgtacatctttaaaccatgagacaaacaacaatttgattttatctgctagcatatttacccac

SEQ ID NO: 130 - DNA, 162 bp, Lilium asiatic
acgctgttattcgcaatgttgccaacttttaaatttagttgcactgatattttcatgcctacgggtgatgctttatttgctccgacagttcattcagaactactatataagtattactcattttatgtcactacttttacaatccaatcattttacaattta

SEQ ID NO: 131 - DNA, 382 bp, Lilium asiatic
acgacgtacgccttcggttgcaatgacataagagataaccgatgaatcttaccgataggatcatgaaaacggcttaggaggacatgaagctgggcattaaagagaactacgacttagatattgcacaggttatgtcagagcttaacgatccaattatcgaccaacaaatacttgtaatagctgtaaagaaacgtataattcgtgaaatcctctgttcatagttcatggaactaataccaattatcccatgaccatttgagaaatctataacacaggcactagtgcaacatgtgtagcacatttcttaactcaacattgaagatacctatgaatttaacttgactcattcgaccgattgaaatttgctgtacatgtttaacca

SEQ ID NO: 132 - DNA, 426 bp, Lilium asiatic
gtagactcaagtgttattatggggcaaactggtgggttccaaaaagatattgagaagtacgaaaatattgagtacatgaaatgcacccctgagaatggcttctttcctgatctatcaaatgtgtcaaagacggatgtcatcttcttctgttcaccaaacaatccgactggttccgcagcatccaaagatcagttgaagaagcttgtgcaatttgcaaaggacaatgggtccattatagtctatgattctgcttatgccatgtacacatcatatgacagtccacgatctatctttgagattccaggggcaaaagaggtcgcaattgagacatcgtctttctccaagtacgctggatttaccggtgtcctgtcttggttgagaccgtcgatgcccccaaagagctccttttctcagatggattccctg

SEQ ID NO: 133 - DNA, 428 bp, Lilium asiatic
caagctctcgcctgcttcttcttcatcatctatggcgaaggatcccgtccgagtgctcgggaccggcgccgcagggcaaatcggatatgctctggtacctatgattgccaggggagtgatgctgggtcctgatcaacctgttatcttgcacatgctggatatccccccagctgcagaatctctgaatggagttaaaatggagttggttgatgcagcatttcctcttcttaaaggggtcgttgccaccaccgatgttgtcgagggctgtacgggggtcaatattgcagtcatggttggtggttttcccaggaaagagggaatggaaaggaaagatgtgatgacaaaaaatgtctctatttacataatctcaaagcttccgcaactcgagaaaagtatgctgctcccaattgcaaggtactggttgtggc

SEQ ID NO: 134 - DNA, 331 bp, Lilium asiatic
ccgatctgtcgtcgacttctacttcgtttggcaatgctctctgccagcctattgtgaggggatcatcgtgcgggcagttgatccaatttagttctcgttgaagaaggaactctactttcgtctctgctattccatccttgatgactgatgcatgatgaacttttcactggagaggtcaactgttcacaagtgctatactctatgtgccctagagcttgcgattgcctggggagacactctctctttactggaagtgggcaaccccaagactacttcaatgtcccataggttgcctaacttttggatgtttgttggctgtatttcaaaggga

SEQ ID NO: 135 - DNA, 378 bp, Lilium asiatic
gcagctcggaggagacgacatcgttgcgagagattaagactaccagttgaagttgttctggttatgagatggcgccacctgcgaaagctacctccaagaagcctgatggcaaggcacaagctctgaaggttgcaaaggcggtgaagtctggcgcttcaaccctgcaaaagaaggccaaaaagatccggacttcagtgactttccatcgccccaagacactgaaaaaggatagaaaccccaagtacccgagaatcagtgctcctcctaggaacaagctcgatcactatcagatccttaagtatccactgaccaccgagtctgccatgaagaagatagaagacaacaacactcttgttttcattgtcgacatttcgtgca

SEQ ID NO: 136 - DNA, 409 bp, Lilium asiatic
ataaattacagtatcttgcttagatgcaaatcacatcattacaataccaaaattttctccgttacaatgttaagtacaaatcactgtctaagtttttttccccagcccattatatacacttggtttgcttgtgatgatgttagtgtcattatgcgttgctttatgcctagcttgcaattgctgccccacaccttttgatttgtattcttcatatcgttttattggtcgtacatgaaaatagtgagttcagttcacagagtggccacatgaaaatagtcagtcgagttgagagtgtggccacatgatgaaaatagtgagtttgagttgagagagtggccacatgaaaatagtgagtatagttgatagtgttgccacatgatgtaaattgtgctataattatgctattgtg

SEQ ID NO: 137 - DNA, 435 bp, Lilium asiatic
  modified_base (390)..(390): a, c, g, t, unknown, or other
ccgcgttccgatctgccgccgactccgacaccgtctggcaatgcttcctgccagccgattatgaggagatcatcgcgcgggcagttgatccagtggagttctcgtcgaagaaggaactctacttccgcctctgcgattccatcctcgttgacggaggcaggatgagcttctcactggagaggtcaacgggtcacaagtgctatactctatgtgcccgagagctggcgattgcctggggagacactccccgttactggaagtgggcaccccgagacgactccaggttcccagaggttgccgaacttttggatgtttgttggctggatatcaaggggagattggactctaaactactcacgccaaaaacaaattatgcttgcctatctcatncttcaaaactagcccctgatacatatggcttcggtttcccaagcc

SEQ ID NO: 138 - DNA, 365 bp, Lilium asiatic
acgcgttcgccagttccgatctgctcgactccgacatcgtctgcaatgcttcctgccatccgattgttaggagatcatcgtgcgggcagttgatccagtttagttctcgtctaataaggaactctactttcgcctctgctattccatcctctttgactgatgcagtatgagcttctcactgtataggtcaactgttcacaagtgctatactctatgtgcccgatagctggctattgcctgttgagacactccccgttactggaagtggtcaccccgatactactccagtttcccatatgttgccgaacttttggatgtttgttgcatgtatatctatgtgatattgtactctaaacttctcactc

SEQ ID NO: 139 - DNA, 432 bp, Lilium asiatic
cccacgcgtccgcccacgcgtccgatcaagtacttttatgacattaaagatcttggcaatttcagggctaatccggattacaagggtgtatgccatgttgctcttgcccaagaaggtcattgtagaccgggagaggtattactgggcacagattcccacacatgcacagcaggtgcgtttggtcagtttgctactggaattggcaacactgatggaggttttgtcctgggtactgggaagcttctacttaaggtaccccctaccttgagatttgttttggatggagaaatgcccaattatctgctcgcgaaggatttgattttgcaaattattggtgagatcacagtttctggtgcaacatacaaatccatggaagtttgttggctctgccaatttgagtgttaaatatggaagagcggatgacattgtgca

SEQ ID NO: 140 - DNA, 360 bp, Lilium asiatic
agctcatggacttcaattcaaaagcctacatatcaaatagaaatatcatttcagagtatggggtatcacagattactgcctttgcacccgagactattgctgacgctaatgatgcaaatgggtgtgactcgtaatcctcgatagagatactgaatcatgaacagcatcagcatgttatacccagccataattaaagttcgaagcctatggaggcttcacgcctgaacatgtggaacttccctgcatcatctatggtagatgttaatgacagataggaatctgaacgcctcgaggttttacagaaacaagtcttcatacagctcatactttcccatagcaaaaccttttgatacagctata

SEQ ID NO: 141 - DNA, 434 bp, Lilium asiatic
gcactaagctagtgtcccagataggactctgggggcgatcaatgggtgccgttacaagccttctctatggagcagaagacccttcaattgcttgcatggtgttagatagtgctttctcaaatttgcctaagcttatgatggagctcgttgatgtttacaaaattcggcttcccatatttacggtcaaaatggctgttcggtatatgcggcacgtaattcagaagaaggctaaatttgacatcaagaatctcaatgctgtacagcttgcaccaaagactaatattccagcgttatttggacatgcatctgaagacacttttatccagcctcaccactcggatcttatctatcaggcttatgcgggcaattaagaaaaacaatcagatttgaaggggtggtcacaactcctccagaccacaatcttactatgattc

SEQ ID NO: 142 - DNA, 349 bp, Lilium asiatic
cagaatgaaagttgcattgggtgctgcgaattgtcttgcttatttgcatgaagaagcagggagaccagtcatatatcgtgattttaagacgtctaatattctgctagatacggattacaatgcagagttatctgattttggacttgctaaagatggccctgatggtgacaaaactcatgtctcaacacgagtgatgggaacatatggatatgcagtcccataatatgtaatgactgggcacctgacattaaagagcgatgtctacagctttggagttgttctccttgaaatgatgacaggcttaaggtccatggacaagaaacagaccgaacggtgaacacaaccttgt

SEQ ID NO: 143 - DNA, 463 bp, Lilium asiatic
cgacaagaaaccgagtatatgcgactcaaatgacacaagatctgtgctgatgattttgaggtattgacgattattgggagaggtgcttttggagaggtcagactttgccgtgagaaggcaaccggcaacatctatgcaatgaaaaaactgaagaaaactgaaatgcttagcagaggccaggttgaacatgttagagctgaaagaaatttgcttgctgaagttgctagtcattgcattgtgaagctctattattcatttcaagatactgagtacctttatctaattatggaatatcttcctgggggagacatgatgacattgctcataagagaagatacgttaactgaaagtgtagcaagattttacattgcacagagtgtgctggcgatagaatccattcataaacataattatattcacagagacattaagcctgacaaccttctgttggacaaaaacggtc

SEQ ID NO: 144 - DNA, 433 bp, Lilium asiatic
cgaggcaattacttcgctgaaggagcggggtggatcaagcccacaagcaattgctaagttgattgaagaaaagtacaaggctcacctcccggccttctttaagaagacgatccttgtccagctaaggaagcttactgcagctggtaagctcaccaaggtgaagtactcctacaagttatctgctaaaccaactgctgccaagccgaaggcaaagaaggcggcagtgaagccaaagcccaaaacaactgctgccaagcccaaggctaaatctgctgctgtgaagaaagccaagcctactgccccaaagctgaagactgcatcgaagccgaaggctgttggacgtccagcaaagactgttgccaagtcgaaggctgttggacgtccagcaaagactgttgccaagtcgaaggctgttggacgtccagcaaagact

SEQ ID NO: 145 - DNA, 286 bp, Lilium asiatic
cagaatgaaagttgcattgggtgctgcgaagggtcttgcttttttgcatgaagaagcagaaagacgagtcatatatcgtgattttaagacgtctaatattctgctagatacggattacaatgcaaagttatctgattttggacttgctaaagatggccctgagggtgacaaaactcatgtctcatcacgagtgatgggaacatatggatatgcagccccataatttgtaatgactggtcacctgacatctaagagcgatgtctacagcttaggagatgtgcttctt

SEQ ID NO: 146 - DNA, 433 bp, Lilium asiatic
  modified_base (390)..(390): a, c, g, t, unknown, or other
gcgcctcctttccccaggtgaagcctgaacaaactgctgcaattatgaaggactttgctgagcctggatctctagcaccaactggcttattcctgggtgatggcaagtacatggttatccagggtgagccgggagctgttattcgggggaagaagggctctggaggtgtgaccataaagaaaaccaacatggctttgatcgtcggcatatacgatgagccaatgactcctggtcagtgcaacatggttgtggagaggctcggtgattatctctatgatcagggattttaggtccattttactcgtttttgtgtctacctttggcatgggtttgcatcttatctgttgatgtggttgaaatgctttgaaatggtcccttggaaacttgtangttaagtgtgttggcatggtgtcttgttggactctggatttct

SEQ ID NO: 147 - DNA, 284 bp, Lilium asiatic
gctagcctatggacttcaattcaaaagcctacatattaaatataaatattactttaggcggattggtatcatagtatcatggctttgaaccctagactattgctagatgcatattatgcaaatgggtgtcactagctatttacaattgaaatactgaatctgcaactgctaccacatggaatacccagccataattgtacattgaagtcttcgatgagtccacgcctcatcatgatggacttacctgcatcatctatcttggtggttaattacattaacgaatc

SEQ ID NO: 148 - DNA, 427 bp, Lilium asiatic
ctgggacctcgcaggctgactgtgctattcttatcattgactctaccaccggaggctttgaagctggaatttccaaggatggtcagacccgtgagcatgcccttcttgcctttactcttggagtgaaacagatgatttgctgctgcaacaagatggatgctactacaccgaagtacgctaaggctaggtatgatgagattgtgaaggaggtttcttcttacctgaagaaggttgggtacaaccctgacaagattccatttgtcccaatttctggatttgagggtgacaacatgattgagaggtcgaccaaccttgattggtacaagggcccgactcttcttgaagctcttgaccagatctctgagcctaagcgcccatctgacaagccccactccgcctccccttcggatgtgacaagattgtggta

SEQ ID NO: 149 - DNA, 377 bp, Lilium asiatic
atctgcactccctcaataaccttgctttacttaatgcctactgtaaccagcatatgattaggagctgaactatcataagacacatgacccactatctataaccaatgacctgcactgcaaattccaaactgactaccatgggccattgcatgcaggattctattactcttaacaacgttaatatttgatctactaagataattaaggatgcaatattgatactgtgattacatttctcatcacactatcatagaactcaagcttctaaacacatttagtgtacaaaatcgcctgtaatcaaaccatatacaacctatcaattggcacaatgtttgcatacgctgtagcaccttaataagacttttacattatattta

SEQ ID NO: 150 - DNA, 410 bp, Lilium asiatic
cccacgcgtccgcggacgcgtgggcgattacccaatttcaccgtccccagcaattttcacctctagcccaccgtttactgcttacccaattcatctcccagaccaattttgattcctggttgaatcacacccacccaccgacccattttcgaacccttttttctcaattgctgttgattatcatgtttccgtatttagggttttgggtagcttgagtttcttgttttagtcaatctgctcgatcagtgatggattctaaggtttcctatgctagcatctgcaatggagcaaagccgtctcccgatgttgtggagtcagatgaagctgctcctctgttgccggcggcggcaaagaagaacggagggatggctgtgaggctgctcgaggagcgagtaaaaaggagtgttcag

SEQ ID NO: 151 - DNA, 311 bp, Lilium asiatic
ttggacgcgtgggctatggttagggtttcccctcttgcagtgatcttgagaagccgatcacgattagggagtttcatagtgatgtgttgagggatgcaatcactcaagttactgctgatgccaaggagaataatcgcaagtttcacggaaactattgagcttcagattggtttgaaaaattatgatccgcagaaagataatcagttcatttgatctttgaaattgccccatatttctaggcctaatatgaaggtctgtatgcttggtgatgctcaacatgtttatgatgcatataaaatcttattatacta

SEQ ID NO: 152 - DNA, 444 bp, Lilium asiatic
cggacgcgtgggtgggatttgaacactacataaaagattgaagctgctggtaaaaagaaggaatagggcaacgcattgttcaaattgggcaaatatgcccgggcttctaagagatacgaaaagggagttaaattcatagagtatgatacctccttcagtgaagaggagaagaagcaagctaaggtgttgaaggtctcgtgtaatctgaacaatgcagcgtgcaagctgaagttgaaggactacaaggaggcacagaagctttgcactaaagtgttggaaattgaaagcgggaatgttaaagccttgtacaggagagctcaggccaacatccagctggctgatttagatgtggctgagcaagacattaagaaagcacttgagattgatcctaataacagggatgtgaaattggagtacaaggttctgaaagagaatgtgaaagag

SEQ ID NO: 153 - DNA, 418 bp, Lilium asiatic
tcggagagatggtggctaagaaagcgagcacagttgcgccggcggcgatttcctcgccgggggggaccattagtgtcaccttcggcaagcgggtggcgctggtgtctgcgccgccgaaggcggcggtcgccaagaaggtgaaggcttcggcggcgaatggcaaggccaagaccatcatcgtggaggcctgcaaacaatgttcttccttcaagataagggctgatgcggtgaataacggcttataaagcgctgtcactggaatcactgttgttattaatcctgagaagccacggcgtggatgctttgagattcgtcaatctggtggtgaagtcttcgtctcacttttggccatgccaagaactttcactaagatgaattatgtcttgatatgggattcaagtcatttctgatattgcca

SEQ ID NO: 154 - DNA, 416 bp, Lilium asiatic
gcgcggacgcgtggcatggtttcaagtgatgttccttccttcagtgattctgtgtttcaagttgaagagaggaagtcttattttttgtaggcaagtaaattcctctgttgattaggagtaagcaacttgagaaatttgtactaaatcctatcaacctagtgttcaaagtaggtttgtcttgattagttctggataacagcctgagtcaacttcatttctggacactgagactactgatgtagcattagtcatagaatttgcaattatattaattggtagtggctgaaactgaaagttcttatgttctctattttgtgctcatacgttgattctaacacatattcttacatatattcttagtatttataattttgtaggtttggattcttggaattggtataattttttatgtcatt

SEQ ID NO: 155 - DNA, 465 bp, Lilium asiatic
tcgtccgcccactcctccgcagactcctgatcccgtcttaccctttaaagatacgagatcaatacatgatatccgggaccctcctactcctaactcgctcttacctggcacaagagttcataaaacttggttactacgtgaataatgactatgatgactagaaactaagacaataacctcctcataaagtgttacatagatctaatacagagaaatatcttgtcagataagcccctagttaccaagttccccattgacttccaaccacaagtcaattatcacggacaacatcttcaatccacttataatgcacaacaaccgcctaccgttgctttacctgatagccaatatgtctccttcgcaactgatcctgaccatggccaaatgccaattaaccccaatctttcttgatgcttatacaatgataaattgtatttactgattcagtcaaaagttttatatata

SEQ ID NO: 156 - DNA, 453 bp, Lilium asiatic
cggacgcgtggggctgactcccatgccattgcattctggcggcatagctgttgctggtggtggcttgttgaggaacaaaggaaatggaaagcaaaagagagaaggtccgtgtgttggaaccaagggctttcgagcaccagaggtgttgttcagatcttatcaccaaggttgcaaggttgatatctggtcagccggtgtcaccctcctttacttaattataggccgatcaccatttgtgggagatccagaacaaaacatcaaggagatagcaaagttgcggggcagcgaagatctatgggaagtggcgaagctacacaactgcgagtcctctttgcccgcggaactgcttgaggtgcaatctctacagtctgtagacttgaaacagtggtgtgcgttgaactcccgaaagccagagttccttgaactggtcccccattccctgtttgatcttgt

SEQ ID NO: 157 - DNA, 470 bp, Lilium asiatic
caatcctgaagcgtgtagcttctgatatccccaaccccccaaacgacacactagccaggagattgggagtcgttctcaaaagcaacgaggatagaagtcgtcgcgagatgaagtctttagtactaaagcttctaaaggagaacagccactcgacgaacgggtcggtcgatatctgcaccgaaacattgtacagctcatgtcgtacttgcttagctacgctgtcaactctgtttcgacaagcatctgaacctggttttgtcgataagcctctggaaagcaaagatcctgtcttgcgacaaatatctctggaggcagataatctcctatggttagtcgagattttagctgacaggcatgtcgtggacgagtttgcactgatgtgggctaaccagaacgagctagctggtttacacttgaagctaaccatcgtatcgcgtcacttggtcagctgtatcacagctaggcttttt

SEQ ID NO: 158 - DNA, 435 bp, Lilium asiatic
  modified_base (391)..(391): a, c, g, t, unknown, or other
cggacgcgtgggtgggatttgaacactacagaaaagattgaagctgctggtaaaaagaaggaagagggcaacgcattgttcaaattgggcaaatatgcccgggcttctaagagatacgaaaagggagttaaattcatagagtatgatacctccttcagtgaagaggagaagaagcaagctaaggtgttgaaggtctcgtgtaatctgaacaatgcagcgtgcaagctgaagttgaaggactacaaggaggcacagaagctttgcactaaagtgttggaaattgaaagcgggaatgttaaggccttgtacaggagagctcaggccaacatccagctggctgatttagatgtggctgagcaagacattaagaaagcaccttgagaattgattncctaattaacagggatgtgaaattggagtacaaggttctgaaag

SEQ ID NO: 159 - DNA, 272 bp, Lilium asiatic
gttggattttaacactacataaaatattgaatctgctggtaaaaataaggaataagtcaactcattgatcaaattgggcaaatattcccggtcttctaatattatactaaaagggagttaaattcatagagtatgatacctccttcagtgaataggagaagaagcaagctaatgtgttgaaggtcttcgtgttatctgaacaatgcatcgtgcaaacttaagttgaaagactacaaggaagcacataatctttgcactaaaatgtttgaaat

SEQ ID NO: 160 - DNA, 429 bp, Lilium asiatic
aagaccggcggccaagattacggttgttacgccacattgcacaacggcggcaacctggtcgtctacagccccaacgccgtacccctgtggcagagcggcaacggaaccacaggaggggaatatgttattcttcttcaaaagaacggagatgccgtcatcttcggcactgctaaatggtgggtggtatggcctacattgaacctagtcgcctctaacaccacagcaccgccgttagaaggtaatgaagaagcaacccaattatcagtaatgtctgaacctactaatgtaccggacaccttggaaagcccagaaactagtgaatccctcccttgggaacataatgttctgtacacttgggaaaccctaaaaactggtgaatccctcacttgggagacgtacagatgcacgatgcaaactgactgcaatttt

SEQ ID NO: 161 - DNA, 395 bp, Lilium asiatic
tcggctgctgcaacatatcaaagaaactgcattggaatgggttctaaagtggaatgcatcccaaagctagatttctccaatcttgagccgggaaacactgcagtctgggatgagctacagggcgaggtaatgcgtgccctcgagtcgtacggctgctttgaggttgtgtacgacagggtcacaccagagctccggaatgagcttttcggccgtgcctggccggaaatctttggccttcccctggaggtgaagatgctcacgaaatcggatctgtccgctgacggatacgtcggacagattccaggatggtcttatgagagtttggtaatcccagatgatgcagagaaatttgctaatactctttggccccaaggaaatctcaccttctgtgatac

SEQ ID NO: 162 - DNA, 379 bp, Lilium asiatic
gagtgttctaagtgccgacagctttctctaggaaggcaatttgaatttcacacaaatggcttgtggacaagaagcagaagtagctgctagtgaaaatgtacttgaatggccacaaaaggacaagagaagattcctacatgctgtttatcgtgtcggggatctagaccgtactattaaattttacaccgaagctttggggatgactctgttgaggaagagagacgttccagaagagaaatactcaaatgctttccttggatatgggccacaagaatctcattttgcggtagaattgacatacaactatggagtggacaaatatgatataggtaccggctgtgggcattttgcaattgcttctgaagaaggatataaaact

SEQ ID NO: 163 - DNA, 362 bp, Lilium asiatic
gtagctgcgaagtttgatgatttagatctgcctcctggggtggaggcaactgtaccgtggttacaaaagcctgttcccgaaaggccaactaatagcaagatgaaggcagtagttgaagatgaagttgacaggaaattcaaactattcaagcagtttgatacagttgtagggcattctgatcaccattttagtaagccggagcttcttaaacttggtccaactaataagaaacctgcaaaggattgggcaaagcggattcagaatgactggaaggttctatagaaagatttaccagagacgatatacgttagactctacgaagaccggatggaccttcttagagctgctattgttgggcctgc

SEQ ID NO: 164 - DNA, 399 bp, Lilium asiatic
ggttaataaaaccattcaaacctcggatactaatctgtcacagacacctttacaatctgaagcactagcacataatggtagcccctctaatcctactgataggggaccttcattctctactgtggtaatttcgccagatgaaatgtaccactttctctttgcgccagttgaggatgaaatgggaggagatcctgcatacttggttgctgttattctagaattttttagaagcttatcgaaggggaaatttaaagttcatccaaatatgtacgtgatgacaatccaattgttagtccggaacaaccgctattcagaacttggattattcgtaataaataagatcatagagccgtctaaagaagttgcatttcagctacttgattcaggccgtcaagatgc

SEQ ID NO: 165 - DNA, 208 bp, Lilium asiatic
cggacgcgtgggcggacgcgtgggcggacgcgtgggttttttttattttttttttttgttttggatatttttatttttttttttttttttttttttttttttttttttttttaaatgtaatattttattatttttttaagtaattattatctataccattatgaaatgataaattgaactgttaaaggggaaattgaaaagtatgata

SEQ ID NO: 166 - DNA, 425 bp, Lilium asiatic
cggacgcgtgggtgaagatctcagactgaagttagacgccatagacaaagaagcatcggatctgaaacataaattagaggcagcacatggcgaaaatgattcattgaatacagaaatacttgcattttcgggcaagatagagcacacggagaaaaccataaatgaattcagagaagagagagaacagatggaacttgacaagtctcagttgcatgccaaaataaatgatctcggggctcatctgcaagcagcgaattctcaactgattgatgtgagtaaatcacttgcagacagataggaacaacataatttagtaactttggaacttcaagaaacagtgaatacaatacaaaaactagaaaatgagatcaagcagttaagagaggaaaattgcgttctgcaagcaaaaggtagcaagctacacg

SEQ ID NO: 167 - DNA, 441 bp, Lilium asiatic
tccgtcagtgatgctcataatattctctattctggtgtaacggaaacataccatgtgaagaagtcggtattgggtgtattacactatagacgatgctatgacattgttggaagttcttgcatgatgcttggtattatctcattggtgatttcaagcactgataatctagcttgttcggtgtgcaagggatgagctgacagaggatggattcagggacagaactggaccttggcgtgatcagggtctgtgcttggtggactggggaaagggggtcgacctaaacctctttcctaccaatacggaattttatggtgattgcggaacatccggcttacgttgtattgagatgcaagaaaatagaccatggagatatcagactgactcctacgccctttgcgttaacgtacatatgatgctccatggggcttatatgaatgtcgt

SEQ ID NO: 168 - DNA, 378 bp, Lilium asiatic
gctgattaagacaactgatgggggggctactgctgcagtttaagatgtttttgcttgtctgtaaaaataaaagagtgatttatccttgtgctgtggccttgttgaaaacaagtttgaaagtgttgagttcgcgcctgatgatgctcaagttttggtcctacccttttcgctcagggtaatctctgtcgttttcgttgctcttttcatcttaggttgcgaagaaaagcggcgagcggccttggtcttcctttctagtatgtaaatatttcggcagcctatctatagataatgatgtagaggccaatttagctagcttgttgtgctggatgtcttatttcaatcatcttatagtttggaactcctagcatgtttctaact

SEQ ID NO: 169 - DNA, 414 bp, Lilium asiatic
cggacgcgtgggaaaactttggcatttattttaccaattttggagtctttaaccaatggacagcataaggcatcaagaaaggctggtcatggaaggcctccaagtgtattggtactcttaccaaccagggaactagctaatcaggttcatgcagactttgaggtatatggtggtgctttagggttatcctcctgctgtctatacgggggatctccttttcgtgctcaggagatgtcactgagacgaggagttgatgtagttgttggaacacctgggcggataaaagatcatattgagagagagaatcttgatttgacgtctctaaaatttcgtgtccttgatgaagctgatgaaatgcttaatatgggatttggtgatgatgttgaacttattcttgggaaggttgctgatgta

SEQ ID NO: 170 - DNA, 390 bp, Lilium asiatic
ctcaagggagccttggatggtggtcttgatattcctcacagtgacaagaggtttgctggtttcaagaaagatgacaagcaactggatgcagagattcataggaagtatatctttggaggacatgttgcctcttacatgaggtctctgattgatgatgagcctgagaagtatcagactcacttttctgaattcatcaagagggggattgatccggatcagattgaggagatgtacaagaaggtgcatgctgctatccgtgaagatccgacaatagtcaagttcaccaagccaccaccaaaggagcacaagaggtacaatttgaagaagctgacctatgatgaaaggaaggctagccttgtcaagcgtttgaatgcccttaatgatgccaac

SEQ ID NO: 171 - DNA, 62 bp, Lilium asiatic
gggggggggagggagggaagagagagaggagagcgagggaggagagagaggagagggggggg

SEQ ID NO: 172 - DNA, 423 bp, Lilium asiatic
gacaaggtctctatcgagcgctgcgatgcaaggagcccccatcttcagaccgtctttcggcaatgcaggttctgttcgaaatctgtccgtgttttaaatttggtttcatggcagcaaatggagcaattgctgaggcgttgaaaggtgaagagagggttcacattatcgattttgacatcaaccaaggaagccaatatatgacactcatacaagcaatttcgacccggtcagtcaagccgcgtaggttgaggataactggagtcgatgatcccgaatcagtgcaacggtccgttggaggattggaagtcattgggaagcgattagaaaagtttgcagaggatgctcgtgtcccatttgagttccgagcgatcgctgctaagattggagatgttagaccgtcaatgttggattgtcaacctggtg

SEQ ID NO: 173 - DNA, 337 bp, Lilium asiatic
tcgcggacgcgtgggcggacgcgtgggtctccatactccttcaaagaggtgtgagcggccagatctacatctaccagcatgttcaccgccagcaagaagatctcgaaggagaagggcctcgagcccaccgagttcgaggacaccgtcgcacaggcgctgttcgatctggagaacagtaacagtgatttgaagaccgagctgaaggatctgtacatcaattcagcagttcagattgatgtggccggtaacaaaaaggcggtggttgttcatgttccgtaccgattgaggaaggcgtttaagaagattcatgtgaagctcgtgagggagttggagaaga

SEQ ID NO: 174 - DNA, 365 bp, Lilium asiatic
atctacatggtgcctttacttagtgagtgatatttctgtgtaaatgcatgcttattgggacttgtgcagccccaatttacaccatttgttatcttcctttctcgttacgttgacagattaagaatatccgtatttacttatacattctgttcactacactactagaaccaatcagaggttgtatatgatacaatttacttgcacctatactttctcctatactatgagattacctgccttattcatcaacttaacatttcatacgctccatctatatcaatcgctaatactactacttgctactattatcaacccacttactctactgatctagagttttaatgaataaaaatacttactgctta

SEQ ID NO: 175 - DNA, 371 bp, Lilium asiatic
  modified_base (328)..(328): a, c, g, t, unknown, or other
caagtcgagactctggttaggcaccttcctcactgctgagatggccgctagaccacacgatgtcgctgttctcgctatccgtggtagctcggccacactaaattttgcagattctgcctggctactcccaatcccgacggtctctctcggacgagcagccattcagcgtgctgcggctgaggccgcccgtgccttcggtcgacaatctgatagtaccactaccgacagtcccaacacgccgtcggaatcaacggcctcctccgagagtaatccagggactatggagcattttaatgagccatttgatatggagtatgcggggatgcangcgagctactatgccagtatggcttgagggctactgctggatc

SEQ ID NO: 176 - DNA, 376 bp, Lilium asiatic
  modified_base (328)..(328): a, c, g, t, unknown, or other
ggctatgctagtacaaagtcaataagagcattggcactacttggagctggtgtttctggactcctgagctttgctactgtagcatctgctgatgaagcagagcatggtctggcatgccccagttatccttggccccacaaaggcattcttagctcctatgatcatgcatcaattcgtcgtggtcaccaagtgtatcaacaagtatgtgcgtcttgccattcaatgtctttaatatcatatcgtgaccttgttggtgtggcatacactgaagaagagaccaaggctatggctgctgagattgaggtagttgatggtcctaatgatgaangtgagatgttcactcgacctggaaagttgagtgatcggttcccacaac

SEQ ID NO: 177 - DNA, 332 bp, Lilium asiatic
cggacgcgtgggcggacgcgtgggggcgaaggcgctccagctccaattggaggttgtggacgtgaagatcgggctggaagtcgatgctctcaagaagggactgcagcgggttgaggagagagacgcaatgctgggtacggagatcaagcaattgggggataggacggatcagctgagcagaacaatctatgaattgaaggatggcggggttctgtcgaaggccgagtatgagtctctcttggatgagttgaagagcggtggtgacggagatttggatttggatcgggttagggcaattgccaaagagattggtgaggaggagatggggaagc

SEQ ID NO: 178 - DNA, 418 bp, Lilium asiatic
gtaggattcagcaggacaatgatctgagagagtcaagtcttcaggctcatcacaaggacgagctaaagaggatacaacttcatgctgaaattgagctgagagagaaagtatcttctttgaggaaagaacacgaaattcaaataaaatctttgaagatggagcatgaagatgggtgcagaaggttacaggaagaattggagctgcagaagtcaaaagaggacaagcaaagagcattgttgcagttgcagtggaaagtcatgagtgaaaatcaacaacatgaccaagaagtgaattccaagaaggaatactctgtttcatcaataaagaagagggatccatataatggaaaggaacacaaacttgcagcaaaaagccctggtaacaaaaaggatgtaaatttgccgggatatgtgcgcac

SEQ ID NO: 179 - DNA, 427 bp, Lilium asiatic
cttcaatactgcactgaggatattcgcccgaacggtggtatggagaagttccgcgctgctgggtacacctgctgcgtggggaagccttcctgacatcccttcagaagtctccagtagtgtagattttctttttctgcattttcctttttgttaaccactctctggctccctcctcggctcccttaatcatgctgaaagatatggaaatctctgttgccgactcctctgcgccttcaccgatctcaccgattggttttgagggctatgagaagcgccttgagatcaccttctttccggcacccctctctgttgaccctaaaggccatggccttcgcaccctctctcgatctcagattgactctgttctggatgctgctcgctgcacaattggttctcagctctcagacaagggactttgattcttata

SEQ ID NO: 180 - DNA, 437 bp, Lilium asiatic
cggacgcgtgggcggacgcgtgggcggacgcgtggggaagagtttgatgatgatccgcaagaggtggagaatgccatgaagagtgggaacggccggcatcgcacggatctggatccttttctggagtcaatcgtgctactccaggctgcgcaggaagcactagaaacagaaatccagaaattcggggaaattggtaaagatgtaattctcaccgacaccaatggcctgctcgagggaactgaaaggagtagctcccctgatcttgatgtccactttctagatttaaatcagcagataaaatatcttgagctcagactggaagaagcatcagcaactatcaaggctaaggattcaaagattctcgagctcgaatccttcgtaaacaaaaccggcatgctgaaacaggaaaccgagagcaccgtccttcaagagaactg

SEQ ID NO: 181 - DNA, 398 bp, Lilium asiatic
  modified_base (342)..(342): a, c, g, t, unknown, or other
gttgggatccctacattaatcgtagaaagtcttatccattccacgaagtggcctacttcaatggagtactagtttgttttgatatagctgagccatactaccccggccgagtcctacgccaatttggtcgtgttcaaaccattcccaaggcccccatgaaggcacataaggacgagcgaggcatcacaagttcacgttacagagtaacatatgatatttctacatggatacaagagaactggcaaaatcatttacttgcagagtcatcacgctccgtacctgttaaggagccttgggactgtacccatgattatttaccgtggttctacaagataacacatncatatgtacagaacccggtcaatagatggaccccggtgagaaaggtttcagtctcg

SEQ ID NO: 182 - DNA, 294 bp, Lilium asiatic
acgcggacgcgtgggtgaagatctcagactgaagttagacgccatagacaaagaagcatcagatctgaaacataaattagaggcagcacagggcgaaaatgattcattgaatacagaaatacttgcattttcgggcaagatagagcacacggagaaaaccataaatgaattcagagaagagagagaacagatggaacttgacaagtctcagttgcatgccaaaataaatgatctcggggctcagctgcaagcagcgaattctcaactgattgatgtgagtaaatcacttgcaga

SEQ ID NO: 183 - DNA, 325 bp, Lilium asiatic
gggctttaccaaatataaccgcagtgactataatatgtggaaaggtatgaaccgcatagtcccagatggagtaaatgctaagctgcttggatgccatggccctcttgctaatcgccagcctggaagagcgttcatagatgctgttgccaaataggaatgtcctacccgtgaatgaaacattctcaactctttcagcatgtgttgttctgtcttttaatttgttcttcagaacttttcagtgacttgtttgtctgtatgatgtttttatatttcggatttagtaccatataaaagatactcttggctattgaacagttattttgtg

SEQ ID NO: 184 - DNA, 126 bp, Lilium asiatic
  modified_base (44)..(44): a, c, g, t, unknown, or other
ggaagaagacagcgggcggagacaagcagaagccagaggcggcngaggagaaaccaaagaaggcggcagcgaagccgaagccaaagccaaaagcagcggccgcgaaacccaaacccaaggcaaaag

SEQ ID NO: 185 - DNA, 392 bp, Lilium asiatic
gaagaaactaaagatattctattgttggatgtggcacctctgagtcttggaattgagactgtcggtggagtgatgaccaagttgattccgaggaacactgtcatcccaaccaagaaatctcaagtcttctcgacctaccaggatcagcagactgttgtgtccattcaggttttcgagggtgaaaggagtctcacaaaagactgtaggatgcttgggaagtttgatctaactggaattcctcctgctcccaggggcactcctcagatcgaagtcactttcgaggttgatgccaatggcatcctgaatgtgaaggcagaggacaaagtcgctggcaaatccgaaaggaacaccatcaccaacgagaaaaggcgcctaagccaggaagagatcga

SEQ ID NO: 186 - DNA, 428 bp, Lilium asiatic
cggacgcgtggggttcttaaatgtgggcatacaatgcatgcagaatgtctttatgagaggctggagcatgaccaatactgatgccctattagctccaagtcagtcattgatatgtccagaatctggaggaaatatgatgaggagatagaagaaatcctcatgcccgaggattaccggcacaaaaaggtctggatcctctgcaacgactgcaacgacattacagaagctgtgttccatgtcatcggccagaagtgtcttcactgtctttcctacaatactcgctcgatcgctcccccggtgcttccttaatgcattgtcctaagatcggcaattgatatattcattgtgcaatttatatattcatcgagcgactaaatgagcttcagcatgcatgtttttactctctactatactatacatgctatctt

SEQ ID NO: 187 - DNA, 432 bp, Lilium asiatic
gttcgatattccgaatggcatcagtagaggtggaatctgctccagtcccggtggaaagtgtaccggcgtccgcaccggttacagaaaaggctgcagtggaagccgcggaggcaaccgtagaagaggtgccagcgcctgcagcagaggagccgacagtagaagttaagaaggccgaagaggcggctgatgtggtagaaccggaagctacacctgaaccagcagcggaggcagttgtggaagagacaccgaaagaagtagcacccgaagctccggcagcagaaccagaggctgctgcggcagctgttgaagagccagctgcagcgccggcagcagttgaagagccagctgctgcggaagctgcagctccggtagaggaaggtaaggtggaggaggtgaaggagtctactccagtgtgattagcatttacgtgct

SEQ ID NO: 188 - DNA, 354 bp, Lilium asiatic
  modified_base (287)..(287): a, c, g, t, unknown, or other
atcgattccccctctatccttgcaaatgcggtgcccggcttacgtacatttgttactgacccggatatatccaccgaaccatatactgctacatgtattcaaaattccctatattgttcgctggatgaatcatctgggcttctgcatagtgtaggaggggcagatccgccggcaagcacctttgtgaaggtttataagtcaggatctgttgggaggtcacttgacatctcacagttcagcaactatgaagaattaagggcggagctgggggagatgtttggcatcangggtcaattcgaagatccttttagatcaggctggcagcttttatttgtccacggggagaatgatgtt

SEQ ID NO: 189 - DNA, 359 bp, Lilium asiatic
gtcgaagagtactgttaattgtgcagatgaagaaggatggacgccccttcactcagccgcaagcagtggccatactgaaattgttgagatcttggttaaaggaggagcgaatgtcaatgtggctaatgatggtggacgaactgcacttcactatgctgccagcaagggacgtctgaaaatagctgaaatcctgacatcccatggtgcgaagctcaaccaaaaagataaggttggctgtaccccactgcacagagctgcaagtacgggacattctagattatgtgagctactgattgaggaaggagctgagattgatgctgttgacaaggcatgccaaacacctctcatgactgcagtga

SEQ ID NO: 190 - DNA, 208 bp, Lilium asiatic
aaacaacattctgaatgtacttagtccttgtgtaatgttctctagtatcttctgcgagtcaggcctctctcgaaacgtaggcaaataacgttatactgttaaattcattagctaccatataacatctgacagctcctttagcataagcatctacaaattaattatagaacgtctccacaatatattcataccacttaaccactcactt

SEQ ID NO: 191 - DNA, 198 bp, Lilium asiatic
cttatatattgtgtatatatgtcacactctttcaccgtctttccaaagctggtgtgggtctactggggtcctgatagtgctacaccagctttggaaagacggtgaaagagtgtgacctatatacacagtatatatgcgaacgcgtttgtcgaccaggatataccggtccgcatccagctggcgtacctgctttatact

SEQ ID NO: 192 - DNA, 316 bp, Lilium asiatic
ccaagaatttgcgctaagtgtcgatggtgctgccccctaaatgtggctcagaagtcgagcgacctcgacaatggcctcccagtgtccatgtccccctccgactcgagcgaagaagtcgtgcatctcctcaccgacctcaaaatcgagttcacatctcctccctccgacggtgggtcgccggtatggaagctcgacagctctgagcccaacggccaacgatatgtgacactaaatgggtctccgcataacgaaatcaaccaggataacatgttcaaaattgagaaagcaggtgctttgggctacaaactgctatact

SEQ ID NO: 193 - DNA, 203 bp, Lilium asiatic
  modified_base (49)..(49): a, c, g, t, unknown, or other
  modified_base (85)..(85): a, c, g, t, unknown, or other
  modified_base (184)..(184): a, c, g, t, unknown, or other
  modified_base (198)..(198): a, c, g, t, unknown, or other
gggacgagccggacagaaagcgcacaaagacggacccaagccacgaagnggccaacgggggaggagcgcaaggcaggagcgaganagcggagccagaccaccccggccgaggccaacgccagagcgggcgcgcacaaaccaggcccaaggcccccacgaaggcacacaaggacgagccaggcangacaagggcacganacaga

SEQ ID NO: 194 - DNA, 301 bp, Lilium asiatic
  modified_base (9)..(9): a, c, g, t, unknown, or other
  modified_base (13)..(13): a, c, g, t, unknown, or other
  modified_base (80)..(80): a, c, g, t, unknown, or other
  modified_base (97)..(97): a, c, g, t, unknown, or other
  modified_base (99)..(99): a, c, g, t, unknown, or other
  modified_base (106)..(106): a, c, g, t, unknown, or other
  modified_base (130)..(130): a, c, g, t, unknown, or other
  modified_base (139)..(139): a, c, g, t, unknown, or other
  modified_base (242)..(242): a, c, g, t, unknown, or other
  modified_base (256)..(256): a, c, g, t, unknown, or other
  modified_base (260)..(260): a, c, g, t, unknown, or other
  modified_base (266)..(266): a, c, g, t, unknown, or other
  modified_base (272)..(272): a, c, g, t, unknown, or other
  modified_base (274)..(274): a, c, g, t, unknown, or other
  modified_base (277)..(277): a, c, g, t, unknown, or other
cggacgcgngggngggggagcgccgcctgcagcaccaggaccaccacccggcggggggcgacgagaagaagcggcggagnaaagccaacgacgagcncnccaacgnccagcgccgccacgaacacgaaanccagcgccnccaccccgaccgagccaagcccggcaaaaacagcgccagggggaagaagagccaggaccagcgagcggcgaagaaggagcagagccaagaacaccaggcaganaaacaggaagagangganaaagcnagaacncnggncgggcagaggagcacaaagcaacg

SEQ ID NO: 195 - DNA, 409 bp, Lilium asiatic
ggggtacaagccagtcatggccatggtggctgtgcagttcttctcggctcttaattcactcgtttgtaaggcagcagtaacacaaggcatgagtattccaatattcttcacctataggcaagtcatagctacttttgctttgggtgcgacaactcttctaacaataagttgtcttcagcaacatcagctagtgctgtgggaaatttaatcctagcaatcacattcgtgatggcagattgtatcggattggataaaattcaaatgaatgaaagaagcatgggtaaagtttttggaacactaatttgtgtttgaggagcgatatctgtggcattattaaaaggtccaaagcttctaaataaggaatttcaaacactaatcgctcatagacacagttggcgatgactggatc

SEQ ID NO: 196 - DNA, 248 bp, Lilium asiatic
  modified_base (10)..(10): a, c, g, t, unknown, or other
  modified_base (72)..(72): a, c, g, t, unknown, or other
  modified_base (97)..(97): a, c, g, t, unknown, or other
  modified_base (119)..(119): a, c, g, t, unknown, or other
  modified_base (121)..(121): a, c, g, t, unknown, or other
  modified_base (182)..(182): a, c, g, t, unknown, or other
  modified_base (224)..(224): a, c, g, t, unknown, or other
gggccggaanccgggggcgacccacgcgaacggcgcagacgagcggagcggaacgagcagggcaggagagancagggagcgaagagcgggcacgacngggagggcgccgagagcccgangnagcacgccgaagcccagacccacaacgacgcgcggggcagagcgcgcgaagcgaaaggganagacaagacaccccaggagcagaacgggaacaccgagcagancacgaagaaggcagcaaacggggc

SEQ ID NO: 197 - DNA, 368 bp, Lilium asiatic
cggacgcgtggggacgaatgtgcgctgcttgcggttgatgcaggcttggcggcgaagctattgttggtcattcagagcgggtgtagccctgcactgaagcagcggtcggctgagttgttgaagttgtgtagtctcaattacacaccgaacaacttcatttcaaagtgcaagctcacccggacgatccaatgacggcatttgttcctcctcgtccctcgcctagttgatgggtacattgagcaattgggaggatggcagtggagatggtttttggctaggaagtatataaagctctcttttctatggggtatacttttaatacaagagattctgctcaattgaagaataagcaacacaatgtggatgcc

SEQ ID NO: 198 - DNA, 402 bp, Lilium asiatic
  modified_base (300)..(300): a, c, g, t, unknown, or other
accaaaaccaagtcttactggccgtgttgaaattctgaaggttcatgctcagaagaagccaatggccgaggatgtagattatatggctgttgctggtatgactgaaggaatggttggtgctgaactagccaacatcattgaggttgctgccatatatatgatgcgagaaggaaggtctgagataacaactgatgacctattacaagctgcacaaatagaagaaagaggaatgcttgataagaaggagaggagtttagagatgtggaaacgattagcccttaatgaagcagctatggctgntgttgctgtgaatttcccggatctaaagaatattgagtttgtcactattgcccctagagctggcagagaattgggctatgtacgggtgaaaatgatcacatg

SEQ ID NO: 199 - DNA, 142 bp, Lilium asiatic
cggccggaaaaccggcacgacccacgcgagacgcgacgaccaggagggacggggccagtagagagacgagagaagcaggcgcagaagaggcggaagacggcagaggaagggagaaagggagcagacaggacgacggaaggaa

SEQ ID NO: 200 - DNA, 113 bp, Lilium asiatic
  modified_base (62)..(62): a, c, g, t, unknown, or other
  modified_base (87)..(87): a, c, g, t, unknown, or other
caacgagcgggaaaccgggaggactcgagggaacggaaaagagacgagcgccaacgagcagncgacgagggaggcgaacgaggcgangcaaggacagaacctcgacgggagga

SEQ ID NO: 201 - DNA, 221 bp, Lilium asiatic
  modified_base (31)..(31): a, c, g, t, unknown, or other
gcgacccaagcgaacgacagaaccaaacccnagaccgagagctacgaggggggcggaaacgcgcagaaggcgaagacggagagcgagcgcaagaaggagaagcagaagaacgccgccaaagggagccaacaggagaccaacaagaaagcgagagccagccagagcaagggatggaagcaaacagagagcggaaccacagcagaggcgaagagcaaggaaca

SEQ ID NO: 202 - DNA, 333 bp, Lilium asiatic
atttgagtttgaaatacaagtgcgattaatacatacctttaaccatttgacatgttatgataaataaattaatatgaataatatttaattaaagtttatttatcttattataaaattcttcttacttaccttatttatttaccccttataccttaaaaaaattttaattaattaattaattattttataaaatttttattaaaatttattaaaaaattaattaaccaattttttattaattaaaaagttatttaaaaaaaaattttttaattctttttatattttataatatcttttttattcttcttttaaaaaaaaaaaggcccccccttt

SEQ ID NO: 203 - DNA, 235 bp, Lilium asiatic
gcacgatatgtcagatcgactcagccggttgggcagagctacttggtaaggctgcagggactgttacgccctatacgaaccgagaatgccggtagtggcgaagatcttggcagcctcgagaatgtttctcagggttcttcgaatgagggggtggtgccatttgtcgtggttgagcaacctcctatgcgctgatggttgggaaaaatgtacagtatttttgattaagtggatggat

SEQ ID NO: 204 - DNA, 401 bp, Lilium asiatic
cggacgcgtgggtgggatttgaacactacagataagattgaagctgctggtaaaaagaaggaagagggcaacgcattgttcaaattgggcaaatatgcccgggcttctaagagatacgaaaagggagttaaattcatagagtatgatacctccttcagtgaagaggagaagaagcaagctaaggtgttgaaggtctcgtgtaatctgaacaatgcatcgtgcaagctgaagttgaaggactacaaggaggcacagaagctatgcactaaagtgttggaaattgaaagcgggaatgttaaggccttgtacaggatagctcaagccaacatccagctggctgatttaaaattggctgagcaagacattaagaaagcacttgagattgatcctaataacaggga

SEQ ID NO: 205 - DNA, 357 bp, Lilium asiatic
  modified_base (211)..(211): a, c, g, t, unknown, or other
  modified_base (214)..(214): a, c, g, t, unknown, or other
  modified_base (262)..(262): a, c, g, t, unknown, or other
  modified_base (264)..(264): a, c, g, t, unknown, or other
aaaaaaaaaaaaaaaaaaaaaaaaaaaaaaaaaaaagagaagaaaaaaaaaaaaggaaaaaaaaaaaaaagaaaaaaaaaagaaaaaaaaaaaaagaaaaaaaaaaaaaaaaaaaaaaaagaaagaaaaaaaaaagaaaaaaaaaaagaaaaaaaaaaaaaaaaaaaaaaaaaaaaaaaaaaaaaaaaaaaaaaaaaaaaaaaaaaaaaanaanaaaaaaaaaaaagagaaaaaaaaaaaagaaaaaaaaaaaaaaaaaaangnaaaaaaaaaaaaaaaaaagaaagaaaaaaaaaaaaaaaaaaaaaaaagaaaaaaaaaaaaaaaaaaaaaaaaaaaaaaaaaaaaaaaaaaaaa

SEQ ID NO: 206 - DNA, 450 bp, Lilium asiatic
  modified_base (42)..(42): a, c, g, t, unknown, or other
  modified_base (44)..(44): a, c, g, t, unknown, or other
  modified_base (56)..(57): a, c, g, t, unknown, or other
  modified_base (62)..(62): a, c, g, t, unknown, or other
  modified_base (72)..(73): a, c, g, t, unknown, or other
  modified_base (79)..(79): a, c, g, t, unknown, or other
  modified_base (89)..(90): a, c, g, t, unknown, or other
  modified_base (94)..(95): a, c, g, t, unknown, or other
  modified_base (149)..(149): a, c, g, t, unknown, or other
  modified_base (178)..(178): a, c, g, t, unknown, or other
  modified_base (192)..(194): a, c, g, t, unknown, or other
  modified_base (201)..(201): a, c, g, t, unknown, or other
  modified_base (232)..(232): a, c, g, t, unknown, or other
  modified_base (268)..(268): a, c, g, t, unknown, or other
  modified_base (271)..(271): a, c, g, t, unknown, or other
  modified_base (273)..(273): a, c, g, t, unknown, or other
  modified_base (310)..(310): a, c, g, t, unknown, or other
  modified_base (332)..(332): a, c, g, t, unknown, or other
  modified_base (352)..(352): a, c, g, t, unknown, or other
  modified_base (362)..(363): a, c, g, t, unknown, or other
  modified_base (375)..(375): a, c, g, t, unknown, or other
  modified_base (399)..(399): a, c, g, t, unknown, or other
  modified_base (430)..(430): a, c, g, t, unknown, or other
gggggggggggggggggggggggggggggggggggggggggngngggggggggggnnggggngggggggggnngggggngggggggggnngggnngggggggggggggggggggggggggggggggggggggggggggggggagggggnggggggggggggggggggggggggggggngggggggggggggnnnggggggnggggggggggggggggggggggggggggggngggggggggggggggggggggggggggggggggggnggngnggggggggggggggggggggggggggggggggggggngggggggggggggggggggggngggggggggggggggggggngggggggggnngggggggggggngggggggggggggggggggggggnggggggggggggggggggggggggggggggngggggggggggggggggggg

SEQ ID NO: 207 - DNA, 434 bp, Lilium asiatic
cggacgcgtgggcggacgcgtgggcggacgcgtgggcggacgcgtgggcggacgcgtgggtttctcgagtcttacatctctatcctcaaatcgagagagacttagggttagggtttcccccatcgccggcgaagatgatcgaggtggtgctcaacgatcgcctggggaagaaggtgcgtgtgaagtgcaacgaggacgacacgatcggcgacctgaagaagctggtggcggcgcagaccgggacccgcgccgagaagatccgcatccagaagtggtacaacatctacaaggaccacatcacccttggggactacgagatccacgacggcatggggctcgaactctactacaattgaggtttgatgttcgctgattctgtctaattcacctatttgctagtttgtatgtaaccgtgggactggatcttgatgatg

SEQ ID NO: 208 - DNA, 379 bp, Lilium asiatic
  modified_base (55)..(55): a, c, g, t, unknown, or other
  modified_base (60)..(60): a, c, g, t, unknown, or other
  modified_base (292)..(292): a, c, g, t, unknown, or other
attcccaatccggaaaccctaattctgatcagctccgatggcccgtacgaagcanaccgnccgcaagtccaccggcggcaaggcccctcgcaagcagctcgctaccaaggctgctcgcaagtcggccccgacgaccggcggagtgaaaaagccccatcgctacaggcccggcacggtggcgctccgtgagatccggaagtaccagaagagcacggagcttctcatcaggaagctgccgttccagaggctggtgaaggagatcgcgcaggattttaagacggatctccgtttncagagccatgccgtgctagctctccaggaggcggcggaggcttatctggtgggattgttcgaggatacaaacctgtgcgctattcat

SEQ ID NO: 209 - DNA, 467 bp, Lilium asiatic
cggacgcgtggggtggggatattcggttggagcagtaccgaaaagaatggtgaagaacgtgggtctctccctaagcaatctcccaataatgagcaagatgacccgtacaaaaagggttttgttcgacaagctcacgacgcttccgcaggaggagaggcattgggcacaactggtccgacccttgccacgagacagatgccaaaggtaccgtcagttggaggcgcttccgcaggaggaaaggcattgggcacaattggtccggcccttgccacaggagacggacgccgagaggtatcgcctgttggagtcattcttcagcatgcatgccttgttcaaatacttcagcctcgatgagctgagtgtggttcatccggtcatccccgtccgtcgatccaatgcaccaaaggaagggcggtagaaagaaagtcattcggagaaagggggagacgatggggtgcttcaatatc

SEQ ID NO: 210 - DNA, 463 bp, Lilium asiatic
cggacgcgtgggttcggctatcaaattcgcaagcttcggcactctgttgggaacttgtggcaattttcagcagggagcctgcgactcaccggactctcacactatactggagaagattatctcagaactgatcttttattcatttgctgctttcatttgttaattcatgtcaatgtttactaatccttatagagcgaaaatccttttgaacatgtattgaaccaaggttctaaaaggcgctaggctaccaatcagccgctgtagaggcccgcaatgtccgcttgtctaggcttccttagtcgtgcctagacattttggaatcctttaattaaatacatggtattgtatactaggttattgaaatgcttatcgtttcacatgtcggataccgcatttcatgaaatgcgtatcaagacatatctgtatcgtaagatacaccacatttttcatgtatatataaaag

SEQ ID NO: 211 - DNA, 408 bp, Lilium asiatic
cgttttatgatgatgctcctgtgggtttcttagctggggggagattagcaggtcgccttgagccggctccgcctgctgctgcaagttttggagcctctgccaccgcaaagatcagcattgatggatctcttgcaggtgccattattggcaagggtggggtgaacacaaagcagattcaccgtattactggagccaagctttatattaaagataatgaatcagatgccactcagaagaacattgagctggagggtaccttcgaccagataaaacatgctagtgccatggttaaagaactgattctgaacataagtgctgcgacacccttccaagctaaacctgcgcctgttgtggcccctggcggaccaagtagtaatttcaagactaagctgtgtgacaatttcacaa

SEQ ID NO: 212 - DNA, 326 bp, Lilium asiatic
caccttaaatatcatcattgatctatctcttgcacctcccattatttacaaccctcactttaacacaaatcatattcaccgtattactctaaccaacctttatattaaacataatcaatcacatgccactcagaataacattgatctttaccctaccttctaccacataaaacatcctcactccatccttaaacaacttattctgaacataagtgctcctacacccttccaaactaaaccttcgccttttataacccctacctcaccatttactaatttcaatactaaacctcttcaccatttcacaaactgatcctttaccttct

SEQ ID NO: 213 - DNA, 234 bp, Lilium asiatic
tctttaaaaaaaaaaaaaaaaagattttatattaacaataaaaaaaaaaatttatccgacgactttttttaaaaaaaacgcgccccacctaactttttcactatatataataaaaattattttataactcacctttaatttatttacatcatccaatacttataaacaattttttttttataaattattaaaaaataaaaaaacttttcttcattttttaatacataatatctt

SEQ ID NO: 214 - DNA, 359 bp, Lilium asiatic
ccaagatatagatagcaaccatttgaccaagaaccctttcataatgactatcctctaataagtgaggcaacatgtgatcaactgagttataatgaggatgagttatctagcttcaccaatgatgagggtacattttttgttgagccacctgagttatatgagagtcctgagtattttgcagatacaacaaacatatgtgatcaactctagaacaatccaatttagatcaagatcttagttcccttatacctatcgatcatctaagtgaccttgaacctattcgtattgatgacacaaatttgggtttggatcaagattatgggacacatgagttgcatgggttatgtgaacccttttac

SEQ ID NO: 215 - DNA, 468 bp, Lilium asiatic
cagctattatgatttctccggtagttttgagaaaggacgtggcaactcaaatgagtcccgagagaagcccccctaatactcccaaggagaggcatgtttgctccccttcattatcagctcagcccattgaagagctggagagctctttctccaagatggagatcagagatgtgcaggttgatgatcaagatgctccgaccaggtggaccaagaaaattgtgtcccgaggctccgataaacatccaattcaccacattcagtggaagaagaaaactgtggaacctaaagattctgcttgtgaagttgccaggacatcaaaaaagtgcttgtcaaactataaacgtgaggaagctaaaatctcagcatgggagaaatcgcagagttcaaaagctgaggcggccatgcggaaactagagatgaagctggaaaagaagcggtcatcttccatggaacgaattctgaacaagc

SEQ ID NO: 216 - DNA, 466 bp, Lilium asiatic
gcagggggttcctggttctctcacagtaccaaagcagaacgagagattatggaggtagctgatgggcctgagcaccatgtcgagggggtaaagccttgcaagaagcgaaagaggaccgaagaagatgatagaatcagcaatctccctgatgccatcattcatcatatattatcttttctttccatagttgatgttgttcggacaagcgtgttcgcgaggagatggaaagacctttggatcgaagcacccagcctcatcgttgatgacctccaagttgacactgaagacaaatttgttaatatttttaatagtgtgcaaaagatgtacaagtccatgaatattgaaagacattctctctcaattcagcaaccgttcaacagaaaggcagttgaggcttgggttcattttgcagtccagcggaatgttgagaaacttcgtgtcaatgcatttcccaagaagcccttcg

SEQ ID NO: 217 - DNA, 467 bp, Lilium asiatic
catgaagccactcttggacttcttttcccagactggcgctccattctttatcaacacatatccaggtatatcttacaagggcgattcagagcacatcgatttaaattatgcactctttcagtctacttctggtatttatgatgcagaaacgaatctacactatgacaatatgtttgatgctgagatcgatgcagcgtatgctgctttgatagctgctggatttgaggacatggaggtacgggtatcagagactggttgggcttctaatggagacaaagatgaggcaggggctacagttcagaatgcaagaacttataactacaatctgcgcaaacgacttgcaaagaagaaagggactccgctaaggcccaaaaatgtggtaaaagcatacatttttgccttatttaatgaggatctgaagactgggccagcttctgagaggcattatggactgttcaagcctgatg

SEQ ID NO: 218 - DNA, 476 bp, Lilium asiatic
agccttccgcattttttggaattcacccgcccttgggggggatgatcttggttggagtgcggtggcagtactgacgaggcggtcatcctcgattcgatctaaagaatttgaggctgagattgctactcttagtgctattcgccatgttaatgttgtgaagttgttttgcagcatcaccagtgaggattcaaacttgttggtatatgaatatctaaacaatgggagtttgtgggatcggcttcatgggccagcagcagagaagttcgtgctggattgggaaacccggtatcagattgcggtgggctcagcccgtgggctggagtatttgcaccatggatgtgatcgtcccatcttgcacagagatgtgaagtctagcaacatactactggatgagggtttgatgccaagaattgctgattttggtctggcgaaaattttgcacggtggcggcgcaggcaaagaagaatcgatgactc

SEQ ID NO: 219 - DNA, 433 bp, Lilium asiatic
gcatatatggaattcagccgcgcattgtggtgatgatcttggttggagtgcggtggcagtactgacgaggcggtcatcctcgattcgatctaaagaatttgaggctgagattgctactcttagtgctattcgccatgttaatgttgtgaagttgttttgcagcatcaccagtgaggattcaaacttgttggtatatgaatatctaaacaatgggagtttgtgggatcggcttcatgggccagcagcagagaagttcgtgctggattgggaaacccggtatcagattgcggtgggctcagcccgtgggctggagtatttgcaccatggatgtgatcgtcccatcttgcacagagatgtgaagtctagcaacatactactggatgagggtttgatgccaaaaattgctgattttggtctggcgaaaattttgcac

SEQ ID NO: 220 - DNA, 429 bp, Lilium asiatic
ttcactactgacaaggtgaggtctttggtccgtaagtggcaaactctcattgaggctcatggggatgtgaagactacagataactacactctccgcatgttctgtattggattcaccaagagacgtcctaatcaagttaagcggacttgctatgcgcagtccagccaaattagacaaattcgccgcaagatgactgagatcatgataaaccaggcgacttcttgtgatctgaaggagttggttcaaaagttcattcctgaaatgatcggaaaagagattgagaagcagacccatggcatttatcctctgcagaatgtcttcatcaggaaagtcaaaattctgaaggcccctaagtttgatcttggaaagctgatggaggttcatgatcacactggtgaggatttgggtgtgaagatggataggcctgct

SEQ ID NO: 221 - DNA, 112 bp, Lilium asiatic
tgactattgaaagatggaataatcaaattattcccatttcacgttcttgttgaacttaaacgcagtgttggaagttcagattttctaccagtgtaataattgttcttcattc

SEQ ID NO: 222 - DNA, 460 bp, Lilium asiatic
cggacgcgtgggtgctaagccactactggttgagccatcatataaaagacttgctatttaagcgctaaaagagcttcgaacttattaaaatccttcgtacacgagctttgctttgatccctgatttgagctagctacgggcaaggaaaacctttaataatctttacttaggtctctaagacacaagttataggggccgagattacgcaggggcaatcgtaagatcttaagggtctctggggcccacgcgcccattcctctttttttgaagaagtgtttcattgctccgatgcctactaggtaagaagctaagaagagctggctaattcgttacttgtaccgctggggactcagaagcacaagcaaagagaggaacgtagtagctcgacccgttaggttatgaaattgatcgactgaagggagaggcgaccggtaagggagggagtagatcaagtcatttt

SEQ ID NO: 223 - DNA, 466 bp, Lilium asiatic
gtcccttttcactggaatcacgcaacagattggcttcaaaaggctgatgtgcctctctactcatcaggtttgtcacattcgatttagataacgttggcccttttcactggaatcacgcaacagattggcttcaaaaggctgtgacactacattcagaatgtctgaccgatcccataaatattttgcatcagcgcctgaagacttttgctgtacccttaatatgttaaagcctttcctttcctgcctagtatgcgaagatcctccaaatatctagggtccgttgaaatatacaaaatgtttgcaccacgattatgcattggccaggcataaatatgagccattatgtgcttatagtttggatgctcatcaccattggtgacttttactcaacaagatggatgcgatcagaggttgacaataaaagccccttaggccacgcgacatataaactcaagagcaaataaac

SEQ ID NO: 224 - DNA, 110 bp, Lilium asiatic
tgactattgagagatggaataatcaaattattcccatttcacgttcttgttgaacttaaaccatgttggaagttcagattttctaccagtgtaataattgttcttcattc

SEQ ID NO: 225 - DNA, 466 bp, Lilium asiatic
gtctcagctcccaccccactacaaggtggaacgatcggtgagctcggctataaacttcctcctaccatctgggagtgttgtaaaactgcatcgcatcccttgtgctgaaggatttcatttctacaagggagaaccactcacggtgtttgaggtctacgatgatggtcggatcaagctgacggacctgggctcagatcttggatctaggcaacgtccccagtacacggtgcctccgaaagtgtggttcggttttttccccaagtttgatgttgaatcgtatgagttcgatggtagctctcttgtcaaagcttcgaatagggaccccgaaaagcattactctcttgttggtattacctgtgctccggcattccagtttgaggactctgaaccaggacagtttgctgagctgagttctttggctccgaatgctcaggcttttattgattacctccttccgagcaattct

SEQ ID NO: 226 - DNA, 396 bp, Lilium asiatic
aacggcttcggggttttaattattaccttatggcatcaaaccggttcttgaaggagttgaaggacctgcaaaaggatccgcccacttaatgcagcgctgggcctgtggttgaaaacatgttccactggcaagcaactatcatgggaccttctgacagctccttcgcaggtggcgtttttctggtcactattcactttccaccagattacccattcaaacctcccaaggtctcgtttagtaccaaaagatttcatacgaacgtgaatagcaatggcagcatttgcctcgacatcctcaaagagcaatggagtcctgcactcaccatatccaaggtgctgttatcaatttgctctctgctgacggatccaaacccggatgatcctcttgttcctgaaa

SEQ ID NO: 227 - DNA, 470 bp, Lilium asiatic
cggacgcgtgggcggacgcgtgggcggtctagagtgcgagaaaggggttccgcggaggatcgagcgatcgcttcaccgactccgggttttgattagtagctgatggcatcgaagcggattctgaaggagttgaaggacctgcagaaggatccgcccacatcatgcagcgctgggcctgtggctgaagacatgttccactggcaagcaactatcatgggaccttctgacagccccttcgcaggtggcgtttttctggtcactattcactttccaccagattacccattcaaacctcccaaggtctcgtttagaaccaaagtatttcatccgaacgtgaatagcaatggcagcatttgcctcgacatcctcaaagagcaatggagtcctgcactcaccatatccaaggtgctgttatcaatttgctctctgctgacggatccaaacccggatgatcctcttgttcctgaaat

SEQ ID NO: 228 - DNA, 438 bp, Lilium asiatic
ggtcaaagctgtgcggaggcttagggagcttctcactactaagctaccgcaaggcatgtgtcccgtcaaggtagccatccctatagtccctacaattcgagtcctcgtcaccttcacaaaattcgaacccctacaaccctccgatgaattcacaactcctccctcgtctccgagccatctacaagaaggtaaagccaaagaaacatccagttcatggtattcatgggtacgaggatctcggggtggtcagtcgagcgacagtcccgaaggccatacctggaatgaggaaatggatcctttccatataccttccgactacacctgggtcgatgccaacgagaagaagcgccgcatgaaggccaagcgggtgaagaacaagcgtggtttaagtaggaaacacacatcaaaaagtggagaaggcccacaactgattgatgg

SEQ ID NO: 229 - DNA, 439 bp, Lilium asiatic
accattggactgttatattacatatgcctctgaattcagttattgtgcggaattcatccacgtgatgctgagctatttcataaatgaaaattttaatttttatacatatgatctatgcacgctgttagaatttggggataacaataacttagttaattgattaacaatagcttgttagggaaattctactgaataactatttgggggagaaagaaggtttttgaatttgaaagtaacaaggtttttgaacttgggctccaatccactggtggcaggcagtatgatttcagatgttggaaattgtcttaaattgttaagattagtttttagttataacaatctcactgattcggcctaaatataggccgtatattatgaaattagtgaggttcggagtaaatacaaacatgtatatcatgtacttgagagttgtcaatgg

SEQ ID NO: 230 - DNA, 466 bp, Lilium asiatic
agcaaaattcaatggcttagatcaatggtgggaagccctgatcttatctccataccaggcgaggtggggaggatgtacgaagctaatgttgatgatgttgggtacagcctcgttgcagtttatacaccagtaagagaggacggtgttgagggagaacctgtttctgcatcaactgagccaattgctgttgagcctgatgtttatagagaagtaaagcagaaattggatcttggatctgtgaaattcgaggcactatgtgacaaggatccatcctcgaaaaagatcccaggagagggaactctcgagagaagaatattggaagtcaatcgaaagaggatcaaggtcatgaaacccggttccaagacttcttttccaactactgaaatccggggaacttatgctcctcctttccatgtggaggtataccgaaacaaccaacaccggtttaagattgtcgtcgacaccg

SEQ ID NO: 231 - DNA, 443 bp, Lilium asiatic
  modified_base (11)..(11): a, c, g, t, unknown, or other
  modified_base (38)..(38): a, c, g, t, unknown, or other
  modified_base (49)..(49): a, c, g, t, unknown, or other
acattttactnttatattacatatccctcttttttcantaattccacanaattcatacacgcgtgcttttctatttcataaatccaaattttaatttttatacatatgatctatgcactcttttataatttccctataacaataacttacttaattaattaacaatatctttttatcaaaattctactaaataactattttttgtacaaataacgttttttaatttcaaactaacaacgtttttcaacttgttctccaatccattggtctcacacattataatttcagatattttaaattctcttaaattgttaataatactttttacttataacaatctcactcattcctcctaaatatattcccatatattattaaattatttatcttcctattaaatacatacatatatatcattttctttaaatatttttaattcattc

SEQ ID NO: 232 - DNA, 461 bp, Lilium asiatic
ctggatcattcagtagcaaaaaatcaacccgcccgcccgaaactgcagtgattagtgagcaagacgctgaaagttcccgtgagaagcaattgctcaaagctcaagagcaaagatacaaagcccgaaggttctcatctttcactagttggattcctgatttgcagagggtgtgggcgctcaagctgccaagggcagagagatcgagcggtgaatcatatcctaagaagtcgaggaagaggaagcggcgcattactgccaatgacatggtgtgtgaaactccgatgaccggaaagagagtttcgcctatcggacgtggcgatggcttctccgaaagtggtcagagcttgtgcagatctctctccaaggttttgtttgccgatgaatgatggtacatgtgttctcgatgttgtgaaacaaatccagagatgtcgaagatataagtaggcaaattcgagaacata

SEQ ID NO: 233 - DNA, 451 bp, Lilium asiatic
gtctaaggtcccaccccactacagggtgcaacgatcgctgagctccgttattaactatctccgaccatctactattgttgtagaactgcatcacatcccttgtgctgcaagacatcatttctacaagggagaaccactcacggtgtttgaggtctaccatgatagtccgatcatgctgacggacctaggctcatatcttggatctaggcaacgacctcagtacacggcgcctgcgatagtgtggttcagttttttcacaaagttggatgttgaatctgatgagtccgatgtgagatctcttgtcatacgctcgaatagggactcctacaagcattactctctagtgggtattacctgtgctacggcattgcagtgtgaggactatgaaccaggacagtttgatgagctgagttctttcgctcccaatgctcaagcttctatggataacctg

SEQ ID NO: 234 - DNA, 352 bp, Lilium asiatic
cttccgcttgaggttttggattggccggccattgcggcgagggacattaagaaaaaatcgaaatttggtgccctcggacaattgtgttgttttggcgggtgaggaaatgacgaggagcttgggaggttgttgggtggtgttaccattgcccatggcggagtcctccccaacatcaacccagtcttgctgccaaagaagaccggaaaggagggtacagagcccaagtcaccaaagaaagctaccaagtcccccaagaaggctttatagttgttgatttgattttggtcgcttgtatgtaatcccctagattacatggaacttggaattatgaaatttgtctgcccgtgttctg

SEQ ID NO: 235 - DNA, 327 bp, Lilium asiatic
ttattttcttaaattttcttacaaggctttttatatacaataataaaaatcaaattcccgcccttttttatggggggcggccacaaattacaataatcttactatttatttccttaattttaccattccccatcacttaatcctcctcaacatcaacccattctttttttcaaataacaccataataacatattcataacccaattcaccaaacaaaactaccaattcccccaataacactttataatttttgatattatttttatcccttttatttaatcccctacactacatctttcttttaattattaaattcttctactcttt

SEQ ID NO: 236 - DNA, 321 bp, Lilium asiatic
  modified_base (12)..(12): a, c, g, t, unknown, or other
  modified_base (21)..(21): a, c, g, t, unknown, or other
caatctttttcntatctttcntccacttgttttaaataccgaagcaactactttttaagcgcgcttttatactatgaggagacatttccaaactccatcaaagccatcactatctcttaacaatttaacccttcttattatgctaaaaacacaaaatcaataagtctactcaaatttaaactcgtataattacacaaccaatctactccatcttacatgacacccaactaaaaatacaatctcctacacctcttcaaacaatttgtacatctattatgcataaaaattatcccttatatttattttttaatttaagcaacc

SEQ ID NO: 237 - DNA, 462 bp, Lilium asiatic
ttccgacatcggaaagcgcgctcgggatctgctctacagggactaccagacggatcagaaggggagcgtcacgacttacagcgcgactggcgtggctcttacggcctctggtaccaggaaaaatgaattgattcttggtgagattcattcacagctgaagaacaagaatgtgacagttgatgtgaaagccaactcagattctaatcttttgactactgtcaccattgatgagcttgctacacctgggctgaagtctattttcagctttgttgttccagatcagagatcggggaaggttgaactgcagtatctacatgattatgctggtgttactgcaagtattgggttgactgcaaaccctattgtcaactttgctggtgtactaggatctaaaatcttctctattggtgctgatgtggcatttgacactgctactgggaatttcaccaaatacaatactgg

SEQ ID NO: 238 - DNA, 461 bp, Lilium asiatic
tgatggcggcattactttctttgatacagctgaagtttatggagcagggtttacaggatcagggaactctgaaacattacttggaagatttatcaaggaaaggcaggaaaaggaatctgttgaggtcgctgttgcgactaaatatgcagctctaccgtggagattaggccgtgggagtgttatttcagctctcaaagattcattatttcgccttggtctttcttcggttgacctctaccagctccattggtctgcctgttatattaaccttgttctatagctgtttaataaacttttgctacgaattaaagttgtctaactagatggatgttggcaatttcaggccgggtatatggggaaatgaaggtagctgatgtagtattcatcctatgaaaattaatatagataatttatctggttgatggatcagatatatctaaaccgtcatttgtctcaacttc

SEQ ID NO: 239 - DNA, 400 bp, Lilium asiatic
attactttctttatcatttttttttatcagcacttttacacacccgccactttaaacatacttcgcacattatcattaaagctataaattaatctttcagtctctcttctactaaatatcactctaccattatataccacctacatttttatttcaactctcaaacataattattctccttatttttcttcattaacctcaccatctcattctctaccttaatataaaccttgtctatatctgttaataaacttttctaccaatcaaagttgctaactatatcatgtctcaatttcatccttttatatttctaaattaagtaacttaccactattcatctataaaataatattataatttattctttatttttcaatatatctaaaccctattctctaac

SEQ ID NO: 240 - DNA, 189 bp, Lilium asiatic
tttaataacaacgcccctcattaaattttactctcttttaccacaaaaaataattaattctttctatattcatcacatcttataacaacaattttacattttattcaaatccaactcacattctaatcttttaactactaacaccatttatcatcttactacactcttactcaattctatttttatctt

SEQ ID NO: 241 - DNA, 455 bp, Lilium asiatic
caacaatggcgcgacgggactgggtatacgagaacaacggcgggacctgcgtggcgatcgccgggcttgactactgcgtggtggccgccgacacgaggctgtccgtcggatacagcatatacaccagggactattccaagatctgccagcttgctgacaaatcagtgctggcatcctctgggttccagggtgatataaaagctttgcagaaaaacttggcggctaagcacctgatctatcagcatcaacataacaaacagatgagctgccccgccatgggccagcttctctcaaataccctttactacaagcgtttcttcccgtactacgctttcaatgtgctaggcggccttgacagtgaagggaaaggatgtgtgttcacatatgatgctgtcggttcttatgaaagggttgggtacagtgcccaaggttcaggctcaacgctcatcatgccc

SEQ ID NO: 242 - DNA, 341 bp, Lilium asiatic
accatgtactttttcaaaatctatctacttccttacatatcatatctctcattctcattcttccaacatcatataaaaactattatttcacctttgtctttcttcacctgacctctaccaactccattaacctacctattatattaaccttcatctatacctctttaataaactctctctactaattaaaattctctaactacatcgattttcacaatttcaacccccttatatggcaaaataaacgtagctgatgtaatattcatcctatcaaaattaatatagataatttatctggttgatggatcagatatatctaaaccgtcatttgtctcaacttc

SEQ ID NO: 243 - DNA, 453 bp, Lilium asiatic
cggacgcgtgggcggacgcgtgggccgacaccccggccgccggagaagaaacacccgagggacaactcctcctcgacatggctaaagagtacgaagataagatatatgcgactacaggttgggatgatcctatgccagagcaggcagtcttggacaagatcaaggagttggatgctgagagaaaggcagttctaaataagatacatgagatccgcctgaagaatgaagaagatgcatatgagatacctgaacacgtcattgttgcctttgtcgacacaattgataaagcacgccggtattttgacttgaagcaacatctaagagactgccgctactttgaggagctcgactttgaaaaaactgaagttttcgaaattctatttgagagggtaaaagatgacaatcttttcgacaatgacgaaggcgatatttggcgtgcagtacaggcacacc

SEQ ID NO: 244 - DNA, 367 bp, Lilium asiatic
  modified_base (52)..(52): a, c, g, t, unknown, or other
  modified_base (55)..(55): a, c, g, t, unknown, or other
cggagaagaaacacccgacagcaacttttactcgacatggctaaatattacnaanataatatatatgcgactacatgttgggatgatcctatgccagatcatgcattcttggacaagatcaaggagttttatgctgagagaaaggcagttctaaataagatacatgatatccgccttaaaaatgaagaagatgcatatgaaataccttaacacgtcattgtttcctttgtccacacaatttataaaacacgcctgtatttttacttgaagcaacaattaaaaaacttcccctacttttatgacctttatctttaaaaaacttaaagtttccaaattctattttaaaaggtaaaaaattacaattttt

SEQ ID NO: 245 - DNA, 438 bp, Lilium asiatic
caatctttttcgtgtctttggtcgtgttgctggaagtaccgaagcaactactttggaagctggcaaaaatcctatgaggagacaagtccaagctccagcaaggccagcacgatctcttagcagtttaacccgtgttgttaggcggggagcagaaaatcaaggagtcgacgcaaatggaaactcgtatgatttcacaaccaagctgctccatctcgcatggcacccaactgaaaatacaatcgcctgcgccgctgcaaacagcttgtacatgtattatgcataaagatgaccctggatatttattttttggtttaagcaaccagcaagaaagtgcaggagggagggagggtgatacgatgtggtagggaggtggtgtaaaggtgccctacaccacgaggaagaaagatatttgttcccgggagggcatcttgctccaat

SEQ ID NO: 246 - DNA, 465 bp, Lilium asiatic
ctccgacatcggaaagcgcgctcgggatctgctctacagggactaccagacggatcagaagtgcagcgtcacgacttacagcgcgactggcgtggctcttacggcctctggtaccaggaaaaatgaattgattcttggtgagattcattcacagctgaagaacaagaatgtgacagttgatgtgaaagccaactcagattctaatcttttgactactgtcaccattgatgagcttgctacacctgggctgaagtctattttcagctttgttgttccagatcagagatcggggaaggttgaactgcagtatctacatgattatgctggtgttactgcaagtattgggttgactgcaaaccctattgtcaactttgctggtgtactaggatctaaaatcttctctattggtgctgatgtggcatttgacactgctactgggaatttcaccaaatacaatactggatt

SEQ ID NO: 247 - DNA, 430 bp, Lilium asiatic
tattgactgaaactgagaaaagggctgtaatggcggaaaccatgttggaggctacattggcgagcagtctagtcaagccagagttcaacagcttccatctccaagatctgcatatgccaatcaagaatcatctccggatacgcctgcgaggaaaccgagcctgatttctaaacaatttagacttggattttttgacaagaacaagggtaatgccgaggactccacggaaggcaacaaaccgtttaatgatgggggacagagtgcagcgaccactcccaatggtgtgaatggccacttatagttggaagcagggccagcaattgggctcacccagtttattatgttgtttcctgtcgatattagcagagaagacatcgtccacttgcatggatggccaagggtgaggattgtgctatactttttctgttga

SEQ ID NO: 248 - DNA, 465 bp, Lilium asiatic
  modified_base (128)..(130): a, c, g, t, unknown, or other
tccgaatttcccggccctttggtttttttttttttttttttttttttttttttttttttttttttttttttttttttttttttttttttttgggggtttttttttttttttttttttttttaaaaatnnncttttttttttttttttttcccttttttttgggaaccttccaaattaaaagaactggggaaccccccaattttacccccccccctccaaaaaactttttttaaaaaaaaaaacttataattttgaaggggtcagggttttccattttaaaaaaattttcccctttttttaaaaaattttcccaactttttgaaaaacttgacaaaaaaaaaaaatcccaaattttttcgggtaaggccagcccttttgactaaaaaaaagggttaatgctttaaaaatttttggggaacttttattttccgggcttttttcatttaaaaataaaaaaacttttta

SEQ ID NO: 249 - DNA, 413 bp, Lilium asiatic
ctgcttcccagatccatccccgaaacggcctaaggcaaaactggcggtcacgacttcaccgcggaggaagctatagggaatgatctggatctcaatacatacaacgataacgagcttctcatcgacaaagatgcttctcaacgtgggttgactcactctaatcacactgagctgacccacctatatgagaagtacaaaggccaagcttttcagacactgtcttttccctgcaatcattaacaagcgcaagaccctgcaaccaataaatagatatgaacacttgcttgcaccctcttcaaaacgcagtatcccatctttgacaagatagatgtgaatcgagacaaagccgcccacatctacaaagacctcagatccagcaaatgccacctgtttggcgatagcatcattggaac

SEQ ID NO: 250 - DNA, 465 bp, Lilium asiatic
aatttgagttaatttaagcacgaatactaccttctttgacaagttcgataggaataatgtgtgcgggaaggtacccaaacttttccggatcctcctatccctaaaagagaacaaattttcacatgttagctgttaggcggagatctcagcgttacataatatccgatttggcactattggataaggcgacaagtcacaactgccaacctcttggccgcctacccactgactgccaattgtgcgactggttgcttcccaggcttgtgtccacacatgacttcctggtcggactcccaggagatgccagtctcgtctgcctacaggagcgcacttgacggtcaacctagtttaaatgttgggcccattcgttggccacttgtcaagcaccccgttagattatgtagtaaggtttgtatccgacaagccaactagatgacagttatccgccacaatctccactaactc

SEQ ID NO: 251 - DNA, 473 bp, Lilium asiatic
cgcccaagccttccgatttggagttaattaaaccacgattcctaccttcttgacagttcgaaggaataagggtagtgaaggtacccaaacttttccggatccccctatccctaaaagagaacaaattttcacatgttagctgttaggcggagatctcggcgttacataatatccgatttggcactattggataaggcgacaagtcacaactgccaacctcttggccgcctacccactgactgccaattgtgcgactgtttgcttcccaggcttgtgtccacacatgacttcctggtcggactcccaggagatgccagtctcgtctgcctacaggagcgcacttgacggtcaacctagtttaaatgttgggcccattcgttggccacttgtcaagcaccccgttagattatgtagtaaggtttgtatccgacaagccaactagatgacagttatccgccacaatctccactaac

SEQ ID NO: 252 - DNA, 398 bp, Lilium asiatic
  modified_base (8)..(8): a, c, g, t, unknown, or other
  modified_base (211)..(211): a, c, g, t, unknown, or other
aatttganttaatttaatcactaatactaccttctttgacaagttcgataggaataacggggcgtgtttttacccaaacttttccgcatccccctatccctaaaacataacaaattttcacatcttatctgttacccccaaatctcatcgttacataatatccgatttttcactatttgataacgcgacaagtcacaactgccaacctctntgccacctacccactgactgccaattccactactgcttaattccaattctagtgttcacacatcacttcctagatccactcccagtagatcccaatctcttctccctacattatcgcactttacgaacaacctaatttaaatgtataccccattcgttgcccacttttcaaacacccccttagatta

SEQ ID NO: 253 - DNA, 416 bp, Lilium asiatic
  modified_base (117)..(117): a, c, g, t, unknown, or other
  modified_base (157)..(157): a, c, g, t, unknown, or other
  modified_base (165)..(165): a, c, g, t, unknown, or other
  modified_base (220)..(220): a, c, g, t, unknown, or other
cgtccgaacctgctgcttaagccgaagacctgcaaagcctattgacgtgcggcaaagctcgaagaaggtcgggggggtaaacctcaaggcaagaggcccgctgtcaagctcgaaggntgaaggctcgctgctgaagccctaagagctgttgccaagncccaaggncgaaggctcccagctgccaagctcgaagccctgcgcccaaggcttgcggcgaagnccgaagcccggcttcctcggctcggcgccaataggctcgcctctgcaataggccgccaagaacctccgccaaggaccgctcccgcaaagaaggctgctgctccggcaaagaaggcaatagtcccaccaccggctaagaaggctgtgcccgcaaagaaagctgctcctgctgccactcctaaaaaggccgctcctgc

SEQ ID NO: 254 - DNA, 260 bp, Lilium asiatic
gttgtagtagtttaaacctttattcagtttcgagttgtagttgctaaaagctttcatttagttgtctgtaatatttccatatgtctgtaattcgactgttatatcaatataattttgtgtttgtacattaaaaaaaaaaaaaaaaaaaaaaaaaaaaaaaaaaaaaaaaaaaaaaaaaaaaaaaaaaaaaaaaaaaaaaaaaaaaaaaaaaaaaaaaaaaaaaaaactagatgggggttgtaaagctaaaatctaaattt

SEQ ID NO: 255 - DNA, 438 bp, Lilium asiatic
tattaactaaacctctgacaactcctttgttgttgtcaaccatgatgacctctacactgcgggttctgtttactctagccgaccttcaacaattaatatctacaaaatcttcatatgccaatcaaaaattattttcttaacactcgaggaaaccgctactcaatcaataatcaattaagacttatattttaatactaaaacaagatttatgaccagaaatctacaaaatgcatctaacccgttacatataagtgacataatgcaactaccactacctatggcttgaattgacacttattattgatagcatagccagcaataattgctcacccaatttactatgttcagttctcacaacattacctaagataacatcttgcactatcatgcataggcactgatcacaaaaatgctaatctatatctaatatactatcta

SEQ ID NO: 256 - DNA, 322 bp, Lilium asiatic
ttccattctccaataatctactatattcccatatcaattaatcattctctcttatactctcttactagtaaaccataccctctatttctaaacaatattacactttctatctattttacaatcaacaatctctaatgctctattaactccactataatctcaactaaactcttttaattatcccctcacattattgcaccttaccacctcccaatggtaataaatcctccacttatatcttctaaacattaccatcaatttttcttacccaatttattattttatttcctatctatattaacaaataaaacattttccactt

SEQ ID NO: 257 - DNA, 453 bp, Lilium asiatic
ctgcccccctctgatggacggcgatctcgagaaggaggaggcggcggatagggcggagatccggcgtgaccgcttccgcctctccgtcatctccatcgccgaagccgaggctaagaagctggggatggagatcgccgagcccgtcgtcgcatgcatcgctgacctagccttcaaacaaaccgaggatttggcaaaggatgtcgagcagttcgcacaacatgctggccgtaaatctgtgaacatggaagatgctattcttgcagcacataggaatgaacacttgactagcttattgaggtcattctctcatgaactgaaagggaaagacccccttaccgaaaagaaaaggaagagatcttcaaagaaggaagataaggcaaatcccagctgatgggaaatatttgacattagtctcggactgttgcttgttgaggatccatgcacagacatgat

SEQ ID NO: 258 - DNA, 138 bp, Lilium asiatic
ggacagagacaacaaccactcccaatggtgtgaatggccacttatagttagaagcatggccagcaattgtgctcacccagtttattatgttagttcctgtctatattagcaaagaagacatcgttcacttgcatggat

SEQ ID NO: 259 - DNA, 284 bp, Lilium asiatic
  modified_base (64)..(64): a, c, g, t, unknown, or other
ttcatgaagctagactacattcctggagcctttctattctagctaaaatgttgcctgtgtagtnagttgctatttcaaatcagaagttttctccttacttctgaaatagaatacttttccctagcagttggaatgagggtcgaactatgccgctaaacatttttcgtaatttccgcatgtatttatcttctcttatgtgtttgtcttgaactttcttgcatgccccagggagacttaatcaacgtgaaacatacaacgtttatgaagtcttattttttaccaca

SEQ ID NO: 260 - DNA, 310 bp, Lilium asiatic
aactgctgctaagccgaagactgcaaagcctaagacggcggcaaagccgaagaaggcggggggtgaacccaaggcaaaggcccctgtcaagccgaaggtgaaggccgctgcgaagcctaaggctgttgccaagcccaaggcgaaggccccagctgccaagccgaagcctgcgcccaaggctgcggcgaagccgaagccggctcctcggccggcgccaaaggctcgccctgcaaaggccgccaagacctccgccaaagacgctcccgcaaagaaggctgctgctccggcaaagaaggcaatagtcccacca

SEQ ID NO: 261 - DNA, 440 bp, Lilium asiatic
gggcgggccgcgcgtccgagaccgtccgttcaaggaacagagacacacattatcagttctggaccgccggttctcgggcggcgggtctaggtcactgaggcctataaatagggctctctctaggattccacggctcacgcgttcgggtctctcggcgatcagattaacttgaagacctaactctgctagcaacatggctcgtaccaagcaaactgctcgcaagtccactggagggaacgcaccaaggaagcagcttgccaccaaggctgctcgtaagtctgcccctacaaccgggggagtgaagaaacctcaccgctaccgtcctggaactgttgcccttcgtgaaatcaggaagtaccataagagcacagagcttctcataaagaagctgccatttcagaggcttgtcagggaaattgctcaggatttcaagacagatc

SEQ ID NO: 262 - DNA, 452 bp, Lilium asiatic
  modified_base (406)..(406): a, c, g, t, unknown, or other
agaccgtccgttcaaggaacagagacacacaagagcagttctggaccgccggttctcgttgaccgggtctaggtcactgaggcctataaatagggctctctctaggattccacggctcacgcgttcgggtctctcggcgatcagattaacttgaagacctaactctgctagcaacatggctcgtaccaagcaaactgctcgcaagtccactggagggaaggcaccaaggaagcagcttgccaccaaggctgctcgtaagtctgcccctacaaccgggggagtgaagaaacctcaccgctaccgtcctggaactgttgcccttcgtgaaatcaggaagtaccagaagagcacagagcttctcataaggaagctgccatttcagaggcttgtcagggaaattgctcangatttcaagacagatctgcgattccagagccatgcagtccttgcac

SEQ ID NO: 263 - DNA, 464 bp, Lilium asiatic
atactgtccaacgtaaagttcatacaggaaaaacggttgatcgggaagtactttgaggagatgagccaagacactgggaagtacgtgtttggtgtcgatgacacactgaaaactcttgatatgggtgcagtggagactttgatcgtctgggagaatctagacattacaaggtttgttctgaagaacagtgtttccggtgaaattgtcataaagcatttgagcaaggagcaggaagctgaccagagcaacttccgtgaccctgccgccaatgcggagttagaggtgcaagagcgtcttcctctactggagtggttcgccaatgagtacaagcgttttggttgtgcccttgagtttgttactaacaaatctcaagaggggtcacagttctgccgaggctttggagggattggggggattttgcgctatcagctggatataagatcgttcgacgaggtgtcggatga

SEQ ID NO: 264 - DNA, 417 bp, Lilium asiatic
cggccgcgtggccaaatagctgccgagaaatctcaggactgcagtcattggtgcttgccagggagacctgatacatggaacgagctactttatgcatctctgctattggatggcgaaggaccctggcgaagatgatgtatcatcgatgtgataaatttcagtggtttgagcttcttcaggtgccgtcagtcatggaagatttcagtggccaaatgaattgcagaaatgattatagatcaagcaggtatgtaccatgctatagcaagcatttcagtttgtttagtttttgaatatgtcttgtaatgcgtggaagcttgctacatatgttgtgtaagtatacgtatttaccagatgatatgcaagtgaattgatcaacattgtgcatatatcataaatttattactcgataactagttg

SEQ ID NO: 265 - DNA, 430 bp, Lilium asiatic
  modified_base (27)..(27): a, c, g, t, unknown, or other
ccgcgtctcatattaagatcaatcgcnacacctgtatctatcatcagaggatgcgtgagcggtctttctgaaagaggggagggatgttgaagaatctgaaggagcaatttcatgatgattttccagttggtcctttgattgggaaatgctgtacgatggatcagggaaaggctgtcatcacattccttgatgccattatggataagactctccgaagcactgtcgctttgattgctgctcgtggacgaggcaaatcagctgctctagggcttgctgttgcgggtgctattgctgcagggtattcaaacatttttgtcactgctccgagccctgagaacttgaagactttattcgagtttgtttgcaagggattaaatgctttagaatacaaggaacatctacattacgatttggttaagagtgctgattc

SEQ ID NO: 266 - DNA, 415 bp, Lilium asiatic
agctcatacaattgttacgattaaccggaataaactttaaagagatggactctaactctgggaagtacaccaaatccaactatccggtcttcaaatggatctatacggaactggggaagactccgatcaagttcagaaatctcgccaatacttgaaacttgatgtaagagtttatcctcggcgaaatcacgctaatcctttatttcacgagtacaaggtatttataaatcccagcacaacggatgtcgtctgctccacaactcgagaggcaatagcgatggggaaaatcgagatctgcgccaaccacccttaaaacgccttcttcaagcagttcccaaattgtcatatgtacgacaatggcttccaattcgtggacttaacacttaaagctctagcggaaaaaccagtcccactc

SEQ ID NO: 267 - DNA, 460 bp, Lilium asiatic
caaaattcgatctcctcgtccccttcacaggcgctcaaggatggccggaagaactcagattgacaccaataactccgctctcatagcgatgatcgccgacgaggataccgtgactggatttttgatggctggagttggcaacgtggatctccgaagaaagacaaactaccttattgtggactcaaaaacaactgttaaagcaattgaggatgcattcaaagagtttacgacgaaagaagatgttgctatagttctgattagtcaatatgttgcaaatatgataaggtttcttgtagataactacaacaatcctgttccaccaatattggagattccttctaatgatcatccttatgaccctacacatgattcaactctttgcctatataataacttgattactccatagtctgtggcatcaaacagacgctaaaacatggttttgctttgagagtctcat

SEQ ID NO: 268 - DNA, 435 bp, Lilium asiatic
acgcagaactatgataaagctttttaaaatgagggaccagaagagggaagatgctggaaatgcggctggaagaggtcctatggagaagcaaagtccaggggaattgcgtgttcaaaaagatattggtgagttgaacctacctaaaactactaccataacatttcccaatggcaaggatgatctgatgaactttgaaatcagcattcggcccgatgaaggatattatctaggtggcacatttacttttacttttcaagtctccccttcctatcctcacgagccacctaaggtgaagtgcaagacaaaggtttatcatcctaatattgacttggagggaaatgtctgtctgaacattctgcgggaggattggaagcccgtactcaacataaacaccattgtctatggcttgaatctccttttcttgcaacccaatga

SEQ ID NO: 269 - DNA, 428 bp, Lilium asiatic
  modified_base (66)..(66): a, c, g, t, unknown, or other
gcaggtccccagcttgtccagatgttcattggtgatggagcaaaactagtccgcgatgccgttcancttgcaagggagaaatctccctgcattatatttatcgacgagattgatgctattgggaccaaaagatttgatagtgaagtaagtggggatagggaagtacagcgcacaatgcttgagttgcttaatcagcttgacggcttcagcagtgatgaccaaataaaggtgattgcagcaactaatcgtgcagacatcttggatcccgctctcatgcgatcaggtagattggatcgaaagattgagtttcctcacccatccgaagaagcgaggacccgcattttgcagatacactcgagaaaaatgaacgttaatcctgatgtcaacttttgagaacttgctcggtctactgatgacttcaatggggc

SEQ ID NO: 270 - DNA, 217 bp, Lilium asiatic
  modified_base (204)..(204): a, c, g, t, unknown, or other
acggcatgtcgtggtttaccgaaactatgggaagaccttcaagaagccccgtcgcccctacgagaaggagcgtctcgacgcggagctgaagctcgtcggcgagtacgggctacgatgcaagcgcgagctgtggcgggtgcagtacgccctgagccggatccggaatgcggcaagggatctgctgacgctggacgagaagaatcncgtcggatctttg

SEQ ID NO: 271 - DNA, 438 bp, Lilium asiatic
  modified_base (6)..(6): a, c, g, t, unknown, or other
  modified_base (17)..(17): a, c, g, t, unknown, or other
  modified_base (33)..(33): a, c, g, t, unknown, or other
  modified_base (45)..(45): a, c, g, t, unknown, or other
  modified_base (53)..(53): a, c, g, t, unknown, or other
  modified_base (101)..(101): a, c, g, t, unknown, or other
  modified_base (377)..(377): a, c, g, t, unknown, or other
  modified_base (388)..(388): a, c, g, t, unknown, or other
gacgancaagaagccgnagccctaggcgggggnaccgcgaggatnaccggganagggagggtaggaggcggagccctgggccaagccgagaaaaggatcgnggaagagactaccgccgccgaagcagaagtgtcagtgcaagcccagatgattatggaggtcgtggaaggggcaaggccaggagcaggagccactcttatgacaggagctcgtctccccgacggacacctcctcgtggtggaagccctgccagacgcaccaatggcaaacggtcactttcccgaagtgtgtcaccccaaggccgtcgtgcacgttccatgagtgcatcgtcacacagctccggttaggatcacattaagaaagacatgtcactctgntcatgactgangaagaactttcaaacaaatcgtctgtgccattaatctggtagatctggat

SEQ ID NO: 272 - DNA, 423 bp, Lilium asiatic
ggacatgcatagtagtggtaatgagagagaacgaaccttgaaccaatcatccatggggtgggataatgaaatctctgggaggagtgatagtatcataatctcacaggatgacgatcgagaagcgagtaacaccttcgaggattccgaagccgttcaattgccattagaaaggacagaaaaatctgatgtagattcgagcctccaacggagtcaaacatttggtcagaggttcatggggaacatgatggataacatttttcttagaaatcttacttctaaatctaagagtctctctgcagatgcccttgtaccatcgtcacctgtaaagatcccagagattgctgagtctgctcttgacaatgatgaagagaacccgctgttggaaacggttcgcggaaaatgcattactcagttactacttct

SEQ ID NO: 273 - DNA, 276 bp, Lilium asiatic
ttaacaattgtacaattgcatggcctctgggtacacaccttctatggactggcggacatcatttgtgacattctagttcacctcagctagtgattcccattggtgcctgtcctgtgaatcaagagattgacatatccgttaatatggaatcacctttggtgcctgtgtggtatacttcttactggaggttagcattaagttccggtcagacatttcctgagctcatatgggttcatattcaggttgcaaatgcccaacaaagttcttcgtctgctc

SEQ ID NO: 274 - DNA, 432 bp, Lilium asiatic
  modified_base (413)..(413): a, c, g, t, unknown, or other
cggacgcgtgggcggacgcgtgggcggacgcgtgggcaaggatgggactgttatgcctcgttcgactccttttactaagatatggcggatgcgtaacaatggtacaattgcatggcctctgggtacacaccttctatggactggtggacatcatttgggacattctcgttcagctcagctagtgattcccagtggtgcctgtcctgtgaatcaagagattgacatagccgttaatatggaatcacctttggtgcctgggtggtatacttcttactggaggttagcattaagttccggtcagacattcggtgagctcatctgggttcagatacaggttggaaatgccgaacaaagttctgcgtctgctcctggtttcccaggtgatcctggaagcagcggtaagaatgagtcanggatcatggaactgaatgc

SEQ ID NO: 275 - DNA, 400 bp, Lilium asiatic
  modified_base (291)..(291): a, c, g, t, unknown, or other
cggataaatgtcgtgcgttggagaccatcttgccgccaagaccgagcagccagctgtctgacatggagctggatgagtgtgaggagactactttatatgatgtcaacatggaggaagaattaaggcggaagcagcagcaccagcagcaggaggcttacgacgaagacgacgatgagtcatctggggctcctagagtacagtgcgcacagcaataaaagtatcactttcatactatttactgtttcttatgtaatgtacttctgtttaagtctaatttcttgtgaaacctgngttgggatttgttttatttggccgatgaattatgtctttttggcaaaaatgttacattgtgttgcctatctatgttagcttttgatgtggatcgatctgaatttggttt

SEQ ID NO: 276 - DNA, 344 bp, Lilium asiatic
cggacgcgtgggcggacgcgtgggcggacgcgtgggcaaggatgggactgttatgcctcgttcgactccttttactgagatatggcggatgcgtaacaatggtacaattgcatggcctctgggtacacaccttctatggactggtggacatcatttgggacattctcgttcagctcagctagtgattcccagtggtgcctgtcctgtgaatcaagagattgacatagccgttaatatggaatcacctttggtgcctgggtggtatacttcttactggaggttagcattaagttccggtcagacattcggtgagctcatctgggttcagatacaggttggaaatg

SEQ ID NO: 277 - DNA, 327 bp, Lilium asiatic
acggctcaagacactctcctggtgcgagcaagggcaaattccctagctcaacttgggaagtacgccggtgagggagagtctgcggacgctaaagaaggcatgttcgtgaagaactacagctactaaggatccacgattgaaagatgatcaaattttaaacaaacttttttgaatgttgctggatcagaatatgttgaatgattataaggttatggatgtaatggagtggcattaggccaatccgtatcgattgttaaatgcacttggttatcgtatgatgttgttactatgacatttggtagattcatctaaagtttcgctagtttt

SEQ ID NO: 278 - DNA, 372 bp, Lilium asiatic
  modified_base (5)..(5): a, c, g, t, unknown, or other
acggncgctcatgatcttaactctaccattagtgcgttcagaggcactcaagaacacagcatagagaattggatagaagacgtgttctcgaaacagctggacctgaactacccctacatgccctatgcaatggtgcaccatggattctattctgcttaccataacacaactatccgtgccggaattctaagtgcttgtcaaatgattagagaagtatatggagatcttcggataatggttacagggcattcaatgggaagcgctatggcgtccttttgtgcacttgatctagcggtcaatcacaagctggatgatgttggacttatgacatttgggcaacctcgcatcggcaacgctgtatttgcatcatac

SEQ ID NO: 279 - DNA, 331 bp, Lilium asiatic
acgcacacctcgcgccagccatggatccaaggccagcacggtgctatcgccaaatcaagaacgagccttaccagaagtcgcgctactgccgtggagttccagacccaaagatcaggatctatgatgctggaatgaagaaaaagggagccgatgaggaccctttctgtgatcacctcgtcagctgtgaaaacgagaacgcgtctagtgaggctatggaggctgctcggattgcttgcaacatatatatgaccaagcttgctgggaaggatgccttccatctactagtgagggtgcacccattccatgatctgcgtatcaacaagatgctttc

SEQ ID NO: 280 - DNA, 331 bp, Lilium asiatic
acggtcagaagggaggacccagttgaagtatgagatgaaatcctatcaagaaatgggtgggacgccattgaagcaaatgagggaagactccctggcattgctttggtttaaaagcgaatatctccaacaacaggaacgaattttgtctcttgaagaaactcaaaagatggaagaagataaactttggaagttgcaaaatgagattcaacctgatgaacgcaacaaagaagactgtgccaagtgtaagctgctgaatggagactcttgagcaaatgactttcctgctcaaaagaaagaagagacattgtggtggtcgtctgtgaagaaaaga

SEQ ID NO: 281 - DNA, 417 bp, Lilium asiatic
aatgacagagatcgtgtggtagaggcaagagatgagcttcacaggatgctaaatgaggatgaactgcgggatgctgtgttacttgtgtttgcaaacaaacaagatctgccaaatgcaatgaatgctgctgaaattaccgataagcttggtctgcattcccttcgtcagaggcactggtacatccagagcgcttgtgctacttctggtgaaggcttgtatgaagggcttgactggctctccagcaacattgccagcaagggttgattgtgaaactatggattcccaatctcagagcagtatccaacggcgtagtggattctcttcggtcaccagtctctttgccgtttattttggacttgatattacctctctagtttttgcttgtgtaaaactatattgttttaagcttgaattgac

SEQ ID NO: 282 - DNA, 409 bp, Lilium asiatic
ctaaacttgagaagactgccgtggaggcaagaactcaacaacagagtgaactgtagcgcgtggcattggataaacttgttgggactgcttaccagaaatacatggattgttcggggcctaacacaaacaaaaacgccaaacttgttgccctggctcttgtcagacggtcattggcacaatatcagaaatttctggagacaaggagtagttgctttaatgagcctgttttccgggacatgttcctctctgtgtcttccagcaaccattgtgtggacattgtcgcagcaggagaaggtgcgaatcgtttggttcccactctgcatccaaaagttacttcagattacaattccaatctgcccccacaatctgtactgaaagtcgatgtccatgattttccgaatttttttcc

SEQ ID NO: 283 - DNA, 410 bp, Lilium asiatic
cggacgcgtgggcggcagtcggctgctgaagaagactttcgagctctccgtgctttgcgatgccgaggttgcgctgatcatcttctcacccatgggcaatctctgcgagttctccagctgcagcatgcaaagtacacttgataattttgtgatgcatgagaaagatatcgacatcagcaggccttcagaagaaaatatgcagcagcaaatggaatgtgaatctgcggatctcatgaagagcattgaaatccttgaagattataaatggaagcagttgtgtgaaaatctggaaacatgttcaattgaagaacttcatgaaatagagggtcagttagagcaaaatttgagaacaataagacaaaagaagaatcacatcatatcagagcaaattaagtcaggttttttttggg

SEQ ID NO: 284 - DNA, 399 bp, Lilium asiatic
caatgattcaggcggtacaagatgctcaacgcctcaaacctccatctctcctatcagttggagtggatttagggtttgacacgatgatgccttggattttcagcaggaagggggcttctgggttttcatggaactcaacggctgaggaagtcacacgagggcttgatggatccggcctcaccgccatcgttacaggggcatctagtgggattggatctgaaacagctcgtgttcttgcattacgtggcattcatgttttcatggcagtcagaaatttgtctactggtgctaatgtcaaagacacaatactcaaggaaattcccactgctaaaattgatgtcatggagctggatctcacatcaatggcatcagtgagaaaatttgcattttgaagttttt

SEQ ID NO: 285 - DNA, 474 bp, Lilium asiatic
cggacgcgtgggctgaaagaagcactctcgtccggtcccgcacttgaacccaccaatccgaattttagaagtacccgtgaagcaattctccaggtcctttcatgtctgactactgttcaatcatactttgacttcttttcaaagaaaattgatcaagagtccgaggaaatacaagaagctgagattgaaagggaacttcttctaaaagaaagagcaatgcaagaagtatctggcagttcacgtgaagaaacaaatttgcctcgtggcattttacatgacgagaaggataaaaaccgtcttcagcaaatcaaggatgaaattcgatcaatagagaagggccggcttagagaagaaataatagcccgtagacaaagtaaacttctaatgagacaagctcgtcaagtgtacttggaagaggctgctgcacttgaaatggagcttcttcaagagttagacagggaaagagcaaatgaa

SEQ ID NO: 286 - DNA, 241 bp, Lilium asiatic
aatttcggggtcgaccgactcatacgatccaatgtgataatacaaatatcgtctcatgcgggttcacgacgtcaataggctgggcgggtgtatcgtattgtgagggcaaagggtcgactacaagataggatggcaggcggaaaagaagagtacaatgccttcttctactccctagtattcacagatacacaggagatgtattattcaactaaaatgcatcaatttttgatagatcaaggtt

SEQ ID NO: 287 - DNA, 342 bp, Lilium asiatic
aacgtttctcctcaaagccctagttttcaacctaactggaatggagaccggatccaaggccaaggagggcgccggaggccgcaagggcagcggctcaagggcgaagtcggtgactcgctcagtcaaggcggggctccagttccccgtcggaaggatcggccgctacctcaagaagggccgctatgcccagcgcgtcggatctggagctccggtctacctcgctgccgtgctggagtatctcgctgctgaagttttggaattggctggaaatgcagtccgtgacaacaagaagaaccggattgttcctcgacatgtgtgtctggccgtgaggaatgatgagga

SEQ ID NO: 288 - DNA, 443 bp, Lilium asiatic
ggactttggtggcatggatttctcgaagctgggcatgggaggcatgcctggtatggaaggcttgggcggcatgggaggcatgcctggtatgggaggcttgggcggcatgggtggtgcagatgatgattttgaggatgacattgaagataaagacgatgagatggaagatgagaaaaccgaagaagcaccacttactacgaaatctggagcttcggaggctgctgatgaatctggacccccaccagctgatgctaattaaatccggaaagtgagagtacctgatgagatccttctttctctatgcttctgtggtagtgaagtatatagggtccattgacatgagtgaatgctagcttagtgttttaatgtgtacttactgttgagtgtagtaatactcagcgttaagttatgatgccaggttgtctttttataatactggtctg

SEQ ID NO: 289 - DNA, 449 bp, Lilium asiatic
cgaagcctaaggccaaaactgctgctaagccgaagactgcaaagcctaagacggcggcaaagccgaagaaggcggcagctaaacccaaggcaaaggcccctgtcaagccgaaggtgaaggccgctgcgaagcctaaggctgttgccaagcccaaggcgaaggccccagctgccaagccgaagcctgcgcccaaggctgcggcgaagccgaagccggctcctcggccggcgccaaaggctcgccctgcaaaggccgccaagacctccgccaaggacgctcccgcaaagaaggctgctgctccggcaaagaaggcaatagtcccaccaccggctaagaaggctgtgcccgcgaagaaggctgctcctgctgccactcctaagaaggccggtcctgcagcgaagaagaatgcggcgactccagcgaatgggaaagtcccggcgagaaaggca

SEQ ID NO: 290 - DNA, 397 bp, Lilium asiatic
accccgtgcagcttcgtatttaaaaggcatgcctgaaaagactgatggtgctggtgtaagacaactgagagacatccaacatcaggttcagatgcagcactacgaacaccgatacctgtctgcccataacatgcagcaaatgcaggtcccgcctgcctcactttgtgggtcatccattaatcttactgggccgaatgaaagtaatcctgataattacagtagaattggaagcaactcaggaagtaaccatggaagctctagggaaaatggaagcagtacagctgttaatggccgaggggtttatatggaggatgctaagggaattgcagaaataaacggaaacagtggtggtgatggaagtgggggcagcagcagagtcgaacaaggacaggtgtgt

SEQ ID NO: 291 - DNA, 428 bp, Lilium asiatic
  modified_base (333)..(333): a, c, g, t, unknown, or other
cggacgcgtgggcggacgcgtggggtgttgagcttgatgattggacttcttgtgttcttatttgttgttgatcctagaagaactctagtttctgacgacgctgatgattacttcgaaagagtcacatttgttggaaaaggaaatgcaatcccagtttccatttggagtgattcctggttggcaatgagagcagtaatgaaggtgcaaacttttaagataattgttttgcaaggtgtcgtcggttctctgccatggacttcaatggtgttcttcacaatgtggtttgaattgataggattcgataataacagctcagctgcactcaacagcctntttgctgctggttgcgccgcatgttcactgctaggagggcttatagcagacaggatatcacgcttctaccctgatacagggccgatcatgtgtgc

SEQ ID NO: 292 - DNA, 322 bp, Lilium asiatic
agaaactagaagtgcattgctcaaagagggcgacttttactttcaatggtcttgattcagatgggactatcacaaaaggaggctattcgaagtacatcatagtcaaagagaggtactgctataggatacctgataactaccccctagctctggcagcacctttgttatgcgcaggaatcacagtgttcactcccatgatgcgccataagatgaaccagcctggtaaatcacttggtgtcattgggttgggtggccttggccatatggcagtgaagtttggaaaagcttttggtttgaatgttacggtttttaacacgagccc

SEQ ID NO: 293 - DNA, 414 bp, Lilium asiatic
aaggccgccaagacctccgccaaggacgctcccgcaaagaaggctgctgctccggctaagaaggcattagccccaccaccggctaagaaagcattagccccaccaccggctaagaaggctgtgcccgtgaagaaggctgctcctgcagcgaagaagaaggcggcgactccagcgaaggggaagtccccggcgagaaaggcgcctgcaaggaaggcggccaagaagtaggcttttgattcgtgattccgatggcagctggctgtaaattggctgatgtttgagggggcatgtgcgtcgttggcatgcgaagtaggttttcctgttgggtttttaggttaatttgtgtactctctccccccacctaaactcgtttcttttatatattagttggttgggtttcagtgtcgatctgat

SEQ ID NO: 294 - DNA, 343 bp, Lilium asiatic
agcgaatgcgatactacaaatatcgtctcatgcgggttcacgacttctagaggctcagcgattgcatcgtattctgagggcaaagggtcgacttcaagataggatggcaggcggaaaataagagtccagagcctgcttctactccctagtatccacggatacacaggacatgtattattcaactaaaaggcaagaaattgttgatagatcaaggttatagctgtaatatcatcacgagcttgccgcctactgattcagggcctgagttgagcctctaccaacttgatgagcaactagacctactgaacaaggtactgaatgcatgggatgttgaagctggatt

SEQ ID NO: 295 - DNA, 441 bp, Lilium asiatic
cttgcagcagtttctacaaaaagatgggaattgactatcttactgagcaagaagactcccgtgaggaatatgagaagctgggaaagcagaggcgggaagagaagctgcaacaacaggaaggcgctgagctgagttttctcaatggacttgatcatgttcaaaagattgaaattctgagtggcattaacgacatgaagaacgagctcacttcctttctggaatcttttgattcatcaaaacctatcaccccagctgatgtacaagaggtgtttgataatcttatcaagaagaagaaacaaaggataatgtaagaccctttccttttcttggtggccgataagggcacagtaaaagttatgcctgacatccaatatgcccatgtagaattagacctggtgctggcagccagagtttactctggatgtaatgtataattttcta

SEQ ID NO: 296 - DNA, 423 bp, Lilium asiatic
cagaatgttgatgcaggtgcagccaaggaacttatgtcacacttggtgactctgcagtcggctcttcctgatgttaacaaaatcataaaagagataagcccagatgtcgccaatgtcgcccaagccgacgaatttgagtacaaggatcctgttgatggctcaatctcgaagcaccagggtatccgatatctctttgaagacggatcgcgactggtattccgtctctcagggacgggatccgaaggcgcgaccatccgagtctacatcgaacagtatgagaaggattccagcaagatcggcagagattcacaagatgcacttgctccccttgttgcggtagcggtgaagctatcgaaaatgcaagaattcaccggtcgatctgcgcctacaggtatcacatagatgacatattgaccacttaat

SEQ ID NO: 297 - DNA, 447 bp, Lilium asiatic
  modified_base (402)..(402): a, c, g, t, unknown, or other
gccccagctgccaagccgaagcctgcgcccaaggctgcggcgaagccgaagccggctcctcggccggcgccaaaggctcgccctgcaaaggccgccaagacctccgccaaggacgctcccgcaaagaaggctgctgctccggcaaagaaggcaatagtcccaccaccggctaagaaggctgtgcccgcgaagaaggctgctcctgctgccactcctaagaaggccgctcctgcagcgaagaagaaggcggcgactccagcgaaggggaagtccccggcgagaaaggcacctgcaaggaaggcggccaagaagtaggcttttgattcgtgattctgatggcagctggctgtaaattggctgatgtttgagggggcatgtgcgtcgttggcatgccaagttagngggggttttttttttttttttcccccccttttgggttttttttgg

SEQ ID NO: 298 - DNA, 456 bp, Lilium asiatic
agccaatgtgataatacaaatatcgtctcatgcgggttcacgacgtcaagaggctcagcgattgggtcgtattctgagggcaaagggtcgacttcaagataggatggcaggcggaaaagaagagtacaatgccttcttctactccctagtatccacggatacacaggagatgtattattcaactaaaaggcagcaatttttgatagatcaaggttatagctttaagatcatcacaagcttgccgcctcctgattcagggcctgagttgagcctctaccaccttgatgagcaactagacctactgaacaaggtactgaatgcaggggatgttgaagctggattagagcagctggaagaagatgctgatgatatcacgcaccacagaacccggcgttcttcagggtcgatgagtgcgttctcaggagcaagcggcatggtttacatggagtacaacac

SEQ ID NO: 299 - DNA, 392 bp, Lilium asiatic
cctcaccaaactacactcccttgcccgatttcttcccctcttcatgaatccccaatccatgttggattttgtcgaatagtttatcatatcttatctcttttaggtttccggccaaactctagtcgtcttctccagccaattgaagattctaagacctatccaaccctttcccatcttcaattactccttaattagatcggattactaattaagcttagtgtttcttttttcaggtttgctggaagcttcgagggagctcaaggatggatcatgagacttctggatggatcaggaagaagcgggaagaccccaggagagcattagaaaggtcaggaggcatccagatgggtcagaggagtctctagaagatgaaggaagggtcaagaattcga

SEQ ID NO: 300 - DNA, 427 bp, Lilium asiatic
cccacgcgtccgcccacgcgtccgcccacgcgtccggtttggacctatgtcactaatgccgcaggcaatgactcaggaggcaacaaggcatgcactccgtgtatatgttggaggccttccacccttggcaattgagcagacaattgctacgtttttcagccaagtcatgactgccattggaggaaactcagctggcccaggtgatgctgttgtcaatgtatacatcaatcatgaaaagaaatttgcatttgtggaaatgctgacagttgaagaagcaagtaatgcaatggcactagatggaattatttttgagggagtctcagtgagagttctaaggccaactgactataatacttcgcttgccgcagcgcttggtcctagccaacccaatccttcatattccctttttaaaaaaaacccccccctt

SEQ ID NO: 301 - DNA, 440 bp, Lilium asiatic
attggaggcaccgtaggcgtgatagtttcgttggttgagttgcttcatgaggggagcccgagggggaagaaggatgctgcaacggctctcttcaacttgtgcatttatcaaggtaacaagattcgtgctgtgagagctgggatactgacacctttactcgaaatgctcaaagatccatccagcaatggcatggtcgatgaagctctgaccattttatcggttcttgtgagccagcaagagggtaaggtggctatagcgaaggctaacacaatcccgcttcttattgatcttttaaggaccgcacagccccgcaccaaggagaatgcaatagcgatattattggcactatgcaaaatgaatgatgccaatctctcttgcattgtgaggctttggtccaggttccctctccctttttttttaaaattttttccctccccccc

SEQ ID NO: 302 - DNA, 319 bp, Lilium asiatic
gcactcatccgagccaatgtgataatacaaatatcgcctcatgcgggttcacgacttctatatgctgaacggttgcatcgtattgtgagggcaaacggtcgacttcaagataggatggcaggccgaaaagaagagtccaatgccttcttctactccctagtattcacagatacacatgatatgtattattcaactaaaaggcatcaatttttgatagatcaaggttatagctgtaatatcattacaggcttgccgacaactgattcattgcctgagttgagcctctaccaccttgatgagcaactatacctactgaaca

SEQ ID NO: 303 - DNA, 306 bp, Lilium asiatic
caagattggaggcattggaactgtgccagtcggccgtgtggagactggtattgtggggcctgttatggttgtgactttggggcctactggtctgaccactgaagttaagtctgttgagatgcaccatgaggctcttcttgaagccctacctggtgacatatgtgggatttaatgttaagaatgttgctgttaaggatcttaagcgtgggtttgttgtcttattcttcaagttttaccctgtctatgaggcggacaacttcactttttaggttatcatcatgaaccactctggccagattggtaatg

SEQ ID NO: 304 - DNA, 471 bp, Lilium asiatic
agaaaaaccagattgacgctgccaaggctactggggtgaaacagattgttttagtaggttctatgggtggaacaaacccaaatcatcctctaaacagccttgggaatgggaatatattggtgtggaagcggaaggcagaacaataccttgcagactctggaataccatacacgatcataagggctggagggttgcaggataaagatggaggcctaagggaattaattattggaaaagacgatgagcttctccaaaaggaaaataaaacaatccccagggctgatgtggcagaagtttgcattcaggcattgctgtttgaggaggcaaaattcaaggcatttgatctagcatcaaagcccgagaatgttggcactccaaccaaagatttcaagaaactcttctcccagatcaatgctcgtttctaagcggaggcatctgcaatctcagactagaccatgtttaccatgtaag

SEQ ID NO: 305 - DNA, 438 bp, Lilium asiatic
ggaatttatcaaggcagttttcagtgtattcatagatctggacttcacatttcttgagatgaatccctttactctggtggaggggaacccttatcctctggatatgagaggggagcttgatgatactgctgctttcaagaacttcaagaagtggggtgagcttgagtttccattgccttttggcagagtcatgagtgcttcagaaaccttcgtccatggacttgatgagaagactagtgcttctttgaaattcacagttttgaatccagaaggtcgtatttggaccatggtggctggaggaggtgctagtgtcatttatgcagatacagtcggtgatctgggctatgcttctgaactggggaattatgcagaatacagtggagcaccgaaagaaagtgaagtgttgcagtatgcaagagttcttattgattgtgcaac

SEQ ID NO: 306 - DNA, 480 bp, Lilium asiatic
cgggaacataatacttgatttattgggaggtgtgctgaactttggacagatgtttgtgcagtctatagatcagggaacatggataaacttttatggtaacatcgggaagacccttctttcattggaagttgtattcttcgatctcctcttcatagtccagcactactttctctatcccaccaggaatgaatctcgtaattcaacgaatcctgatgaagccatctctcctcttatcaaggcgcgggaaaaatcgccagaggcaaatgtttaaccgtacgcccctggccttggcactggaccaagataacttcttcagacattcccccctttcttcggaacacagattaacgacgatggtggtttgcatgcccgatcttttcagaaaccgggggcttgtatcaggtatgtaatatctttggttcctgtataatgtactgataaccaacaacccaagttcactaagctctaacatataaatgg

SEQ ID NO: 307 - DNA, 159 bp, Lilium asiatic
ttacatcattaatcatcctgttatgcctgaacgcaactggcacatctattatgctactgacaatcctgacaagcccatggtgactcttgaaatattcatcactgtcctgagcatttacaaatcatctgacttcttcaagagtttttcttatggccacac

SEQ ID NO: 308 - DNA, 432 bp, Lilium asiatic
ggtgttacggatatatttggaaaatgcctacctgttcttgaggagatggtagagcagaagatgccgttgctggtacacggggaagttacagatccacatgtggacacatttgaccgagaaaaagtcttcattgagactatcttagcgccattgatccagaagcttccaaatctcaaggttgtaatggagcatattactactatggatgctgtcaggtttgttgagtcatgcaatgaagggtctgttgctgcaaccgtgacaccgcagcatctacttctcaacagaaatgctttgtttcaaggtggactgcagcctcacaattattgtctaccagtactgaaaagagagacgcataggcaatctcttgtgtcagctgtcacgagtgggagcaaaataaacccggggtttttttttttttttttattttttttc

SEQ ID NO: 309 - DNA, 390 bp, Lilium asiatic
cggacgcgtgggatcttctacatggatgtcatcataaacacccaatggatgggctgcgccttgtattccccccggctgcaactgctattctctctgtgccgttttataatctaatttggctgatttcgactccttccactgcccctgcgatatttggaggtggattgttgggctatgtgatctatgactgtactcattactacctgcatcacggacaaccatcgaaagatcctgttcggaatctgaagcgttttcatttgaatcatcacttcagagttcagactaagggatttgggattacttcttcactgtgggacaatgtgtttgggactttgccaccagcaccaaaatatgctgcaaagagcagttgatatcttctgtgtatgcagc

SEQ ID NO: 310 - DNA, 418 bp, Lilium asiatic
gaaaatcaatcaacagatacggaaagcttatgctcaataggattgactgggcaactgctgttggcaatggagaagagggagctgagaacagtgacatccctgttaacagttgtggtttagtgtggcagggtactgttgcaagacctaacttccataggtttatcattcatcaatgcagaactgatgctgctgccaagaaggtgtttgcggatgctggggtgccacactactgggatttagctatcaatttcactgatgaggtactgtgagttcagtaattgtgagcatgaaacttattaggcttttggatagcagtatctttgtagttgttttgtctcgtggaacctttttcaaagctgtgttacggattatgctggattggataacagaactagttggttgggctcgtctggaaaaa

SEQ ID NO: 311 - DNA, 130 bp, Lilium asiatic
gacccacgcaatcacacaatcaatcctcatacactgaaagcttatgctcaatacgaaccactctacagggcccggtcaaaatatacaatagggggccttgaacaatgtcatccctcgttacacaatagct

SEQ ID NO: 312 - DNA, 404 bp, Lilium asiatic
cggacggtgcagatctcctcccccttcatccccatcgtctcctccctcctcctctctccagcctccgatctctcacatccccgtaaaatcaaaccccatcaaaagggttctggcgtcggcgaagcgcccgcggatggcggaggcaccgggtagcccctgcggcgacagtggcggcgaccagagccctcgctcccacgtccgtgagcaggaccgctacctcccgatcgccaacatcagccgcatcatgaagaaggcgctccccgccaacggcaagatcgccaaggacgcgaaggagaccgtgcaggagtgcgtttccgagttcatcagcttcatcaccagcgaggcgagcgataagtgtctgcgggagaagcggaagacgatcaatggagatgatttgctgtggg

SEQ ID NO: 313 - DNA, 453 bp, Lilium asiatic
ccatctcttgtgttgcaccaaagtttgagctaatgttgttggagctacacctacgaagcttttctttgaagggttaaaataaaccgacttccatcctcgacagtgaattgataatccagtgatgagatcctccgctggagaatcgtatcttactccaatctctgttccccatttagtgttttgctcgtatgtgcacgttgcaactgtctttgctctctcttccaagatagatgcactctcatctagctttctcttatttgctccttcccagtcttcctgttggaactccctcccgtggtgttgataaaattaagcaggctcagcattcagtctcagtttcaactgtagaatgtgccacttcaacacctttatctaatgttccaatggagaattgtggttcatccatagatgtagacctcgaaaatttgaacatttttgctgatactcctggca

SEQ ID NO: 314 - DNA, 461 bp, Lilium asiatic
ctcgaacttatattgaacaaatacaattagaaaagcttgtgaatgaagtcatggcactgccagatgatttaaagtcaaagcttagcatagaggacgatctggtttctagtcccaaagaagcactttctcgagcctctgctgatagggttgccatgagaaacaaacatttaaagagtggtatgtcacaatcctattcggcggttggggataagcatctagctaataatctaccaaggctcaccgtgaatgaccgaagttctgctggacgagctcccgattctcctgcaattgatcagggaatggttactcaactctcggaacatatatcgatcatgagtgagagaatggatgtgttcacttctcgtatcgaagaactaaattccaagctcagtgtgcagaagtcgtctattagcccacagaacctatcacttcgtgacgcctgttacggctctacacccaca

SEQ ID NO: 315 - DNA, 201 bp, Lilium asiatic
cacatgtggacacattttaccgagaaaaagtcttcattgatactatcttatcgccattgatccacaaactttcaaatcttaaagttgtaatggagcatattactactatggatgctgtcaagtttgttgaatcattccattaaaaggctgttgctgcaaccgttacacctctatatttactttttaacacaaatgctttgt

SEQ ID NO: 316 - DNA, 167 bp, Lilium asiatic
gagaacctagacgccggcgcttcataagattatgttgactacgacaatcatgacggggaggctgttaatcaaggcgaggatgctagtgcataagacgcctctaaaagatgatggacataaattttacgagaaacttcctgatattattctactttagtaactaccta

SEQ ID NO: 317 - DNA, 323 bp, Lilium asiatic
tgttactatatatttttaaaattcgttctcttttctttatgatattatacatcgtaagattcctttaattgtacacttttaatttacatatccacattataacacattttacctataaaaaatcttcatttacactatcttatctccatttatccataatcttccaaatctcaatgttataatatatcatattactactattaatactatcatttttaattattcatacaattaattttctatttcttcaactcttacaccttaatatttacttcttaacacaaattctttttttcaattttaactttcatcctcacaattat

SEQ ID NO: 318 - DNA, 466 bp, Lilium asiatic
gatgataaactcggagctctatgcatgcagtggttggaagataaggtattcgcaattcgtgacgcagctgctaataacttgaagcgccttgcagaagaatttggccctgaatgggcgatgcagcatataattccacaggtcctggagaagattagtaatccacactatttgtaccgcatgacaattcttcatgcgatttctctattggctcctgtcatgggcgcagacgtcacatgccagaagctattacctgtaatcatcaatgcctcaaaggacagggttcccaacatcaaattcaatgttgcgaaagtattggagtcactcgtacctatagttgatcagtctgtggttgagcagacattccggccttgcctggttgaactcggtgaggatccagatgtggatgttaggtttttcgccaaccaagctcttcaagcatgtgatcaggtcatgatgtcaagttagg

SEQ ID NO: 319 - DNA, 451 bp, Lilium asiatic
acagaaccaaaccctagaccgagatctccgatggggggcggcaacgcgcagaaatcgaagacggcgcgcgagcgcaacttggagaagcagaagaacgccgccaaagggagccaactggattccaacaagaaagcgatgtctattcagtgcaaggtatgtatgcaaacattcatctgtaccacatcagaggcgaagtgcaaggaacatgctgaagcaaagcatcccaaatcagagctgactcagtgctttccccatcttaaatcatcataagagtgttccaagttaagaagcatctcgctccatcaaatcaacttatgtctatatatttcatctagagttgtgtaattgaaaccttgaatggtgtggaaacaatgctgtgtttgcatatttaaaccgagttttatgctgctttaatatcctagccaacatatgtgctctttaagacatattt

SEQ ID NO: 320 - DNA, 128 bp, Lilium asiatic
acgcttgatctaaaccttagacggagatctcagatggttggcggaaacgtgcatggcgcgacgatcgctctcgagggctagagctataatactatgtatgctgtcaaggcgaacatactggattagga

SEQ ID NO: 321 - DNA, 458 bp, Lilium asiatic
cggacgcgtggggtcgggctcttggaagggtatttcttcgagcttcggggaacactgttgctgttggtatcataacacgggttcttgatggtgcttcttagatcttaaagcagtagtgactttcgctggtgtggacctgcaatgctatgtttcgttgagggaggatttggattgaaatactgccactacatgtacataagaacagtttgaaactctctatcatacaaattgatagttagggcgggaaactgaattcaagggttaattagatgttattatgtcgtccataagtctttcagttacccccacgaacacttggaagttggttattagtatgttaacaagaacaagaagagatataagtgatctcctaagtttggtgatcatttcatgtaatatatggatacttttagttttttagtacaaaatatggatacgatacttgtagtttttagttc

SEQ ID NO: 322 - DNA, 473 bp, Lilium asiatic
ttgaaggggtgggaagttcgccaaggtacttatttccaggacgtggttgtttccaagtatgatggaggaatggatgcaaaatttgagtttacagagtcaggagaagccttattctcaggatatgttttgactcgaggtggttatgtcgaactttcaaagaagctatctctcccattgggtttaacgcttgataggtttgatggtttggttctttctgttggtgggaatggaagatcatttgtcttgattcttgagactggaccccttgccgatacttctcaaagcaaattgtattttgctcgaatgaacacaaaagtgggcttctgcaaggtgagagtgccattttcatcttttcgtccagtgaaaccggatgatccaccggttgatccttttcttgtacacactttaactattcgctttggaccaagaagactgagagcttttgaagttcccctaggaagtaagcaggatct

SEQ ID NO: 323 - DNA, 416 bp, Lilium asiatic
cggacgcgtgggcggcactacttcttcaggaattcatacccctggatatggtgcccaacagtcatttttctctcaacaccatgaggctgtattgggtaagagtaaagttgatcatggattaaatgggtcggctgcaacttcggcaactcctgaacctagtacagttgatggggggagcaactttatgtctaaaaaagatgaacactggatatctggtcatgcagttggtggtgcgaatgtcaatgatgcggaggcaggttttggtggtgatctgaagaatacagaagacaagggcagaaacaacaaggattcccgagcaatgaagttttttcattgtgctttggttgattttgataaggaactagtaaaaccgtcttggcgagatggtcatttaagcaaggatgctcataagatgg

SEQ ID NO: 324 - DNA, 482 bp, Lilium asiatic
  modified_base (233)..(233): a, c, g, t, unknown, or other
atcaacttcaatatgagagaccaaacgatctatgtacgctgccggccgcatcttaaggagtttgtggagagagtctccactctatttgaaattattatttttacagccagtcagagtatctatgctgagaagcttctcaatgtactggacccccagaagaaattattccgacatcgtgtttaccgcgagtcttgtgtttatgtggagggcaatttcttgaaggatttatctgntctaggtcgagatttggctcgtgttatcattatcgacaactcaccacaggcttttggatttcaagtggacaatggcattccaatagaaagctggtttgatgaccgaacggatcgggagctgcccttgcttcttccttttttggagagcttggttggagttgatgatgtacgaccgttgatagccaaaaagtttaatcttaaggaaaggatctcggcagcagcttcattgaattgatgtcaacaagtaat

SEQ ID NO: 325 - DNA, 282 bp, Lilium asiatic
cttacctttaccaaccttatctcggttactagtcttaatacactttatgacgagcgatttaccctgtaggacattacttgctaccaagcttctaaggatgatattgctgtatactcagcactttctgctgtaccattttcatattatgataatgtatctaagtggtataaacacattgctgctcttcttataatgaggttaatgtgtttatctgttgttatttgtgttattgttcattgattttcttttcttgactagtggcttgttctattcattggtatc

SEQ ID NO: 326 - DNA, 444 bp, Lilium asiatic
gagaacaaagacgccggcgattcagaagatgatgatgacgacgatgatgaggacgaagatgctgatgatcaagatgatgatgcgggtgaagaagatgcctcagatgatgagggtgataaaaaaaaaaaaaaacttcctgatatcattctactttgttcactacctcttctcgtccgtgaagatcgattaggaggttgcctccttgagattcagcagtagtttgctttcagttaagatcccttgattgggttacaatgttatctatccaggtaaaagtcgagttgaagttcgaggtgcttaaactgacggccgagtgcagcaaaagaaatattttgtttttttaactcgggaatttttaatgagtacaattgaagatgatctggtatgttatcttctgtttaagacaagctgtggtatgccgtagtgcttcagttgtaattcata

SEQ ID NO: 327 - DNA, 371 bp, Lilium asiatic
cctgcattattttcattgatgattttatagtttcttgtgacaacttcgcagggactatcatgaagcagggactaacattaaaacctattttatgtcattattggattgttttaccacataccatatctcactttttatgtttcttgcttctacaaaccttccatcctatctatactattcaatccttctactctttacccattccttttataatgtgataccatatctgatttagatatctaatatatttcacttagttctcattggataaatagtttattataacattgactactatggtatatctagtatttgttataatttcactgtttctgacctactttatctctttaaacaatcctcatattttt

SEQ ID NO: 328 - DNA, 393 bp, Lilium asiatic
ctccaacctgcaattattttcattgatgaggttgatagtttcttgggacaacgtcgtacgacagatcatgaagcaatgactaacatgaaaaccgagtttatgtcattatgggatggtttcaccacagaccagagcgcacgggtgatggttctggctgctacaaaccgtccatccgagctagacgaggcaatccttcgacgctttacccagtcctttgagattgggataccagatcggagggagagagctaagatattgcaggtggttctcaagggagaaagagtagatgatagcattgactacgatggtatagctaggatgtgtgaaggtttcactggttctgacctgcttgatctctgtaagcaaagccgcattattttcctgtcaggggaa

SEQ ID NO: 329 - DNA, 439 bp, Lilium asiatic
  modified_base (429)..(429): a, c, g, t, unknown, or other
cttgttctccgcctcagaggaggaatgcagatctttgtcaaaaccctaactggcaagacaatcacccttgaggttgagagctcggatactatcgataatgtgaaggcgaagatccaggataaggagggcatcccaccggaccagcagaggctcatcttcgctggcaagcagctcgaggatggtcgaactctggctgactacaatatccagaaagagtcaaccctccacctggtgcttcgcctcaggggaggcatgcagattttcgtgaaaacactcaccggcaaaaccatctccattttagttctgtttctggttaagtgcaacagtagtttgtgattgcttcccgatgtgggttgggtctgttaaactcgtaccttttcagatctatttggtgtggtggtgaatctgtgtttgaataatatgtttaanggattgattt

SEQ ID NO: 330 - DNA, 454 bp, Lilium asiatic
cccacgcgtccgcttccagccaatgatttggagcaagatgaaataccagtaaaaactcattctaaatctttgaagctaccgaaggagtttgatgcaaggactaactggcctcaatgtatcaatattggaaacatacttgaccagggtcattgtggttcttgttgggcctttggtgcagtagaagcactacaagatcggttctgcattcattttggcatgaacatttccctatcggttaatgatcttttatcatgctgtggctttctgtgtgggagtgggtgtgatggaggttatcctatacgtgcgtggaggtatcttgcccgtagtggtgtggttaccgaggagtgtgatccttacttcgacaacacttggtgctctcattcaggctgtgaacctggtttttcaacaccgagatgtgtgagacactgtaaagattaaaatcgggtttggagga

SEQ ID NO: 331 - DNA, 432 bp, Lilium asiatic
gttttatcatccccagcaagctcttcgattcctctcgaagggcctcttagttcccgtctgtcccaaccatggcgaccactcagaaggccatgagcaagaagcgcaagttcgttgccgatggcgtattctttgccgaattgaatgaagtcctcaccagggagctcgccgaggatggttactccggcgtggaggtgcgcgtcacgccgatgcgtaccgagatcatcatcagggccaccaggactcagaacgtcctcggtgagagggggcggcggattcaggagctgacctcggtcatccagaagaggttcaaatttcccgagaacgcagttgagctgtatgctgagaaggtgaacaaccgtgggctcttggccgtggctcaagctgagtctcttcgatacaagcttcttggtagccttgctgtcaagaaggctt

SEQ ID NO: 332 - DNA, 468 bp, Lilium asiatic
gagacacgaagatcgtcaatgccgcttccttcaccatcgagcgggaggaccacaccttcggcaacatcctccgaatgcaactgcaccgggatccaaacgtgctcttcgccggctacaagctgccgcatccgctgcagtacaagatcgtactaggatccaaactacaagccagtcttcgccgggccaagcgtacagccaggcagtcagtgatctggatagggaggttcagtatctgaagaatgctttccaggcaaatgattacccatttgaggccacataatattttcacagagaacaatcaccggaattttgcttttggctctgtaaatgctctgaatgatgctttgagatttatgatcggctggcccagactgctgcgattgtgatattctagaggaatctttggctgagaaggaaagacaaggaaggcttaaggttgctattgtagggagcgggtttcggacttta

SEQ ID NO: 333 - DNA, 438 bp, Lilium asiatic
agcattaaagcgcccaaagaaaagcaccgatacagagcaagcagggggttcaagtgcagaggatgaatcaagggtggctaccaccactgaatcagaatcatcaaggcacagctcttcccctccgagaccatcccatgcacccgatcgaagcgggtcaataggctctgaggatgcaccagtcaatgagcgtcaagcagcggcacagaaaacccccacctcttctgcagatagaatatcccagtatacactcaacagtgcagaggtggcgcaagtggagtcggtgaagaagcgtctgatggaacgcactgaaggattcggcataccgcggcttgagaagctctacacacggatgctgaaaggtgccttggcagtgcggagtggggctttgaaggaccattaaaaaaaattttttttttttttgggggaaaattttttttt

SEQ ID NO: 334 - DNA, 385 bp, Lilium asiatic
tgattgttctggactgtcctttcgggattttttggtaggaaagcttcctgccattcccggagaattaccaacactgaatgattgggagaatcatctgacaacaatttttcctgaggtcaggttaaaaaggtacttggaaatgagaggagctgatggaggtccttggcggagattatgtgcgctcccagcattttgggtagggttgttatatgacgaggtctccttgcagaaggtattggatattactgctgattggactaatgaagaaagagagatgctcaggagaaaggtgccagtgactggtttgaagacaccatttcgcgatggtctgttaaggcatgttgctgaagacgtattacagttggcaaaggaaggcttggaaaga

SEQ ID NO: 335 - DNA, 381 bp, Lilium asiatic
gtcgaatctacagatgaaggagctgaagaagctgccatatatggacatcgaactgcatcggcagggcccctatctgggcctcacacaagacccgatctcatatcattcggcgaatgtatggctactcacctcagcactcaaccaactacaatcactgttgcaggctgtgcacacacactgtattattcaaatgcttctcacatggccgatgcctgtcaaactgcatatccctagaacattaaggaaatctgtatggcacactcaggagcaaacggagaagcacaagatgatcacgatgactgaggtgaagctcatagtgagcaagaagctataaacgactctgaccagacaagacgttcagatgaagcacgatgatgtgct

SEQ ID NO: 336 - DNA, 341 bp, Lilium asiatic
aattcccggtcgaccaggcgtacgcagacgcgtgggcggacgcgtgggctgacgcgtgggtgtggaggcattactttcagaatggacagggactcatcttggtggtggatagcaatgacagggaccgtgtcgtcgaggctcgagatgaactgcacaggatgctgaatgaggatgaactgagggatgctgtactgctcgtgtttgctaacaaacaagatctgcctaatgctatgaatgcagcacagattactgataaactttggcttcactcccttcggcaacgtcattggtacattcagagcacatgcgcaacttctggagagggtctttatgagggtctt

SEQ ID NO: 337 - DNA, 462 bp, Lilium asiatic
gtgccaaccaccgagatgtgatcacttcacccagagctccaaggtcccactgatgttgcctgagaacgaggtcgacgctcttggttgagtttatgcctccactactactgctcttgtgaccactaccttctcttgagattgtgcgcttcagttgcagctccggtcttcgaaagactttcctaaacctaattatagatcaatggcctttgttattggtacgccgagtggttatgctttatgttttgatacatttgttcattgtatctttgattttggtacattttttcatcttttcatgatttgtgatagttcactacttactactgtacttgactgttttctactgtactctctcttttactcacttttcatgtgttcgctttgcagataagactcctctgtccatcacgcagtgtggcacaatcactaatgccaccgatcctgacaatggctaccatcttt

SEQ ID NO: 338 - DNA, 151 bp, Lilium asiatic
acggagccaaccaccgagatgtgatcacttcacccaaagctccaaggtcccactgatttagggggagggcgacgttcaacgcgtctgggatgaattaatccctccactactactgttcttgtgaccactaccttttcttgagattgtcccc

SEQ ID NO: 339 - DNA, 218 bp, Lilium asiatic
ggcagtacggtgcctaaccaccgagatgtgatcaccttcacccagatctccaaggacccactgttattgccggatagggagatcgacgctggtgggttgattttatgcctgcactactactgctcttgtgaccactaccttttctttagattgtgcgcttcagttgcatctcctttcttcggaagactttctcaaactctattatagatcaatggcct

SEQ ID NO: 340 - DNA, 481 bp, Lilium asiatic
cggacgcgtgggcggacgcgtgggcggacgcgtgggtgtggaggcattacttccagaatacacagggactcatctttgtggtagatagcaatgacagggaccgtgtcgtcgaggctcgagatgaactgcacaggatgctgaatgaggatgaactgagggatgctgtactgctcgtgtttgctaacaaacaagatctgcctaatgctatgaatgcagcagagattactgataaacttggtcttcactcccttcggcaacgtcattggtacattcagagcacatgcgcaacttctggagagggtctttatgagggtcttgattggctctcaaacaacattgccaataagtcttgaaagaactatgccatcatctgtgttggatctggatgcagagtgtgctgaatggggggcctgatggattatgtgacattttaaagtctacctttatttgttttgacatttatataggcttaatgaacata

SEQ ID NO: 341 - DNA, 322 bp, Lilium asiatic
ctccaacctgcaattatttccattgatgattttcatagtttcttgtaacaacatcggacggcatattatcaagcgttgactaacattaaaaccttgtttatatcattatttcattgtttcaccacaaaccatatctcacaattaattattctgattgctacaaaccttccatactacctatactatccatttcttcgacactcttacccattctctttagattgctataccatatcttagtaatatacctattatattacatatgtttctcaagatatacttattacattatatctattactacgatggtatacttattatt

SEQ ID NO: 342 - DNA, 316 bp, Lilium asiatic
aattgagttctataagaaggagggtttgactccttattctgttgccaagcttcctattgccagtgatgtccctgaaggatgtgtgatcatcagagaacacaccccaattaccaaccttttcacctgtctctggttcaatgaagttgatcggtttacgtctcgggatcaactcagcttcagtactgtaaggtgacaaaataatgtcaaaggtaaactggactgtcaacatgtttctggactgtgaaaggcgcacctttgttgttcaggcttaccacagaactagagtaaaggaaggcacttgcagttacccgactac

SEQ ID NO: 343 - DNA, 410 bp, Lilium asiatic
gcgtacgcggacgcgtggtcagacgcgtgtgtggtgggaccgggtatcaaggtggagctcaacctggggcggtctcgcaaggggactaccaggtgcctcatcaagggcatttttcgcaaggcatgagttacatgcattctcagttgcataatgtggacctccaaaattaaacatatctgcctgctacttagatgcttatttgatcaggagtctctaggtattgaatgtttgtaagggatgacataaatattcgggtgctgaccttgataggatctatgttgggttagtttaattaaccgaactagttgaaacaaggcacttctactactttgctgtagtcagaatatcaaatttagtgaactgtgttaatataaataacatctgtactctaatttcttcagaatattata

SEQ ID NO: 344 - DNA, 387 bp, Lilium asiatic
gttgaatctacagaacaaggagctgaacaatctttcatctatggacatagaactgcgtcgggaggtcccctatatgggcatcaaacaagtctcgttctcatatcattcggcggatgtatggctactcagttcgctagtaaaccacctacaatcactttggaaggctttggtcagaccgtgacttcttcaaatgcttctcaaatggttgatgcttgtcaaactgcatatgccttgaccattaacgatatctgtgaggcagactcaagagcatacactggagcacaagttgagcatgaagaaagaggtgaagctcaacgcgagcaacatgctatagacgacccacaagaaacaagatgtgcagatgatgcaccatgatgtgtacgaggc

SEQ ID NO: 345 - DNA, 394 bp, Lilium asiatic
ctaaacttgagaagactgccgtggaggcaagaactcaacaacagagtgaactggagcgcattgcattgcataaacttgctgggactgcttaccagaaatacatggattgctcggggcctaacacatacaaaaacgccaaacttgttgacctggctcttgtcagacggtcattggcacaatatcagaaatttctggagacaaggagtagatgctttaatgagcctgttttccgggacatgttcctctatgtgtcttgcagcaaccattgtgtggacattgtctcagcatgagaaggtgcgaatcgtttggttcccactctgcatccaaaagttacttgagattacaattgcaatctgcccacacaatctgtactgaaagtcgatgtccatgattt

SEQ ID NO: 346 - DNA, 364 bp, Lilium asiatic
cggacgcgtgggcggacgcgtgggcggacgcgtgggaaaaacagtgggatgaacgggaactcacgagctatgtctcgttctgacgagatttgcgttttctgtggtcttcggaacgagttctcgatcactctcacaagatctgtggcggtctgctgagttttgcgtttttctctcaagatctgtgacgatctgaaggtatcagcattcttggctcaaaatctgaggcttactcacctatctcttgattaatgtctctgtcaaacaccgagggttagatgtgttttgtgttgtcatgccgggcctttgccatgttgggtgagctcacatggcaggtcaactcatgcttcaataaaattctattggt

SEQ ID NO: 347 - DNA, 349 bp, Lilium asiatic
tgcttgtgttagtgcttgactgagctcgatcccccctggagaccgaatcgaaaatcgtattcatgcgaccctgccccttcataggagactaaattacataccgccctatctgtcatacagagccctatagacgtccggtagtaaagggcgaaaatctcggcgaacgcgagagacccgtcaaacaccattgtctttcccgtttgggcgaacgggccgaaaggcggaacgaatagacggagagcgggatccccttaggattctcccgaaactacgcggtatccggacacttcctcgaggtacgagaagctccgaatacctcgccggtctacccctcctagccgccgaataa

SEQ ID NO: 348 - DNA, 232 bp, Lilium asiatic
ggcggtgaggtcagaccggagaattggaattggatgtataaccagatgaagatttaagttcttctcctccccgataacatgtatctcaatatttagagagaagtgcaggcttttatcgattcatgcattggtatcttagatttaagattcatagttttcaatttggtactcggttatttaaagactatcctttattggttttcttcttaattctaagagattaaaggttgga

SEQ ID NO: 349 - DNA, 372 bp, Lilium asiatic
cggagatttatacgaagtcgatggaacgggaaattccggatgactgcaacattaggggagaagatgtcactattggtgagaagcttgaacagttgttcctgaaagatgttagaatagctttgccagattgggcgagtgacataactactatcttgtggtttcctgtccgcgctattgaggacaggctggcaagaggaacatctgcagtttatccccaaaatctgagtgttgtagatggaatgaggaaagtggctttaaagcttgagtttggagctttccacaaccaaatattttaaaggaccattgcagtgcatttcactgatcccttccgtgtcagtacacgtgttgccgacaaatgcaataatgggactc

SEQ ID NO: 350 - DNA, 426 bp, Lilium asiatic
cggacgcgtggggcgatgctctagtttaaatgctttttcagcttctgtctctggtgttggttcagagacacagatttggtgaattgccttgcagttttcgggttttgcaacattgtgacccgagggctttggtcttaacttttggacctttgatttcttgaatatcatcagcttaattcagctagcagagtgacactgttagtttagttaagatagtgatattgaattgttcctttaaactctgatgatattatgcattgattggctgtaggggtaagtgacatatcccgattgtaatcagagatattctgtgattagttaactaggtagaaagaaagctaagtgacatagctcttctgaaaaactcagttaatccaattaatcttaatatgaaatagaagtttgtccttaaaggccattaatgat

SEQ ID NO: 351 - DNA, 252 bp, Lilium asiatic
ggcggtgaggtcagaccggagaattggaagtggatgtataaccagatgaagattgaggggcttctcctccccgataacatgtatctcaatatttagagagaagtgcaggcttttatcgattcatgcattgttatcttagatttaagattcatagttttcagtttggtactcggttatttagagactatcttttattgtttttcttcttatttctaagagattaaggtttggagcagattgttaatcttcaac

SEQ ID NO: 352 - DNA, 409 bp, Lilium asiatic
cggagatttatacgaagtcgatggaacgggaaattccggatgactgcaacattaggggaggagatgtcactattggtgagaagcttgaacagttgttcctgaaagatgttagaatagctttgccagattgggcgagtgacataactactatcttgtggtttcctgtccgcgctattgaggacaggctggcaagaggaacatctgcagtttatccccaaaatctgagtgttgtagatggaatgaggaaagtggctttaaagcttgagtttggagctttccacaaccaaatattttaaaggaccattgcagtgcatttcactgatcccttccgtgtcagtacacgtgttgccgacaaatggcataatgggactctacttttgcaagtgattattcacttccaagtgaaggc

SEQ ID NO: 353 - DNA, 393 bp, Lilium asiatic
ggacctttgggctgatttatgtgcttgtgtggtggtggagactaagctgaagactccttgtacccccggaagggagaagttgacctagtatgcgtccggtggtggaaaattcgtcgacacaccttcacggagggataagaaagctctcgtcggcgcgtccggcggcgcaatggttacccgggcttcgcccgactcgtcggatcattactcgtctatctcggcgcgttatcgttctacttccacgtcggttacttcgccctctcggcttaacgtcattatccctactaataagctcttattatataccttcgaagcgagtactttggaagactcaatcgcttagaccgtttccctctcgtgacatcacactaactgcgggcccgtctcctccaa

SEQ ID NO: 354 - DNA, 291 bp, Lilium asiatic
tatttcactactgttcgaaatactacctatcgtctacgaacacctttcactacactcgacacgctcccgcagcaaaaaaccacccacgactccaaagatcgtcacatctaaataaaaaccacaaaccctttctcacgtctcccacaaaccgcctaactcccagaaagccaccgatctcatccacccgcacccgtaaaatccaatactatacgcaaccaccaaaccagctccgactagtaacctacatcccctagccgcacctcccaatcatcaacgatacccatcacacct

SEQ ID NO: 355 - DNA, 402 bp, Lilium asiatic
ctgaaatttcttgatcgggagcaagaaatcgagaggaatggatcccgattcgggggaatcgaccctcacgaacctagcatatggcaatgtaatggcagctgctgctcgagactatcaaaaggaattgctagctaatgagaaggctcaggcagccgcttctaccaatgaagatgttgatcttgatgaattgatggatgatcctgagttggaaaaattgcatgcagacaggattgcttctctgaagagggaagctgaaaaacgagaggttttaaaaagacaaggtcacggagagtatagggaggtaactgaaagagaatttctgggggaagttacgaaaagtgaaaaagcaatctgccatttctttcaccgcgagttctaccgttgcaagataatggacaagca

SEQ ID NO: 356 - DNA, 402 bp, Lilium asiatic
cgcacccgagacttacgggagtgctcaggcatcaaatgttcctggtagccaaaatggggcaaatggcgggcagcagatgtttcctatgttctaccctgccaccgtaccaggatcagttcccgtgcaaaactccgaagtaaatgatcatggtgcaggtctctatgctgttcctttttctccattcatgggaacaatggctgggccttctccaagcacacttatacctcttagatacaacataccaacaagggctagtgccaccggggcagttggagaaaatcaggggcaagaagcaaggcatgcgcatggaccccagagacaagtagctgtgcggaggttccagttcgctattcagctcgacctgtctctcatccttaagctggcagctgcaatcttcttggt

SEQ ID NO: 357 - DNA, 436 bp, Lilium asiatic
cggtccgtaattccttcctcgggcgacccacgcgtgcgtggtgactctgcagtcatcccttcctgatgttaacaaaatcataaaagagatggggccagatgtcgctaatgtcgcccaagccgatgaatttgagtacaaggatcccgttgatggctcaatctcgaagcaccagggtatccgatatctctttgcagacggatcgcgactggtattccgcctctcagggacaggatccgaaggcgcgaccatccgtgtctacatcgaacagtatgagaaggatcccagcaagattggcagagattcacaagaagcactaggtcccctagttgcggtagcgttgaagctatcgaaaatgcaagaattcaccggtcgatctgctcctacagttatcacatagatgtcagatcgaccacttaattttgctagcatatgtgct

SEQ ID NO: 358 - DNA, 416 bp, Lilium asiatic
cgcacgcgtccggggttcagaaggagctgaaggaatgcaaccgcgacacggcggtgtccggcgtcagcctcgagcctgccggcgccggcgccgccagcctctcccacttctccggcaccatctcgggccccgtcggcacgccctacgagggcggcaccttcaggatcgacatcaaactccctagtggttatccttttgaacctcctaaaatgcagttcgtgacgaaagtttggcacccaaatatcagcagtcagaatggtgcaatttgcctggacattttgaaaaatgaatggagccctgccctcactctgaaaacagcactgctctcactgcaagcccttctgtcagcgcctgagcccgacgatccccaggatgcagtggttgcacaacaggtcctgcctgacttcccacagttt

SEQ ID NO: 359 - DNA, 414 bp, Lilium asiatic
cggacgcgtgggtgctaagccactactggttgagccatcatataaaagacttgctgttggagcactaaaagagcttcgaacttattaaaatccttcgtacacgagctttgctttgatccctgatttgagctagctacgggcaaggaaaacctttaataatctttacttaggtctctaagacacaagttataggggccgagattacgcaggggcaatcgtaagatcttaagggtctctggggcccacgcgcccattcctctttttttgaagaaatgtttcattgctccgatgcctactaggtaagaagctaagaagagctggctaattcgttacttgtaccgctggggactcagaagcacatgcaaagagaggaacgtagtagctcgacccggtaggttatgaaattgatcgact

SEQ ID NO: 360 - DNA, 393 bp, Lilium asiatic
gcatcttcctcagttcgagagatatggtgtccggcggcaagtcgaagaagggcacgggtggccgcatcggcggcgggccgaggaagaaggccgtctctcgctcagtgaaagccggcctccagttccccgtcggtcgtatcggacgtttccttaagaagggccgctacgcccagcgaattggcaccggtgcccctgtctaccttgccgccgtgcttgagtacctcgccgcagaggtgctggaactggcgggcaatgctgcgaaggacaacaagaagaaccggataattccgaggcacctgctgctggctgtgaggaacgatgccgagttggggaaattgttgggcggcgtcaccatcgctcatgggggtgtgctggcgaacatcaactctgtgc

SEQ ID NO: 361 - DNA, 322 bp, Lilium asiatic
gcatcttcctcagttcgagagatatggtgaccggcggcaagtcgaagaagggcacggggggccgcatcggcggcgggccgaggaagaaggccgtctctcgctcagtgaaagccggcctccagttccccgtcggtcgtatcggacgtttccttaagaagggccgctacgcccagcgaattggcaccggtgcccctgtctaccttgccgccgtgcttgagtacctcgccgcagaggtgctggaactggcgggcaatgctgcgaaggacaacaagaagaaccggataattccgaggcacctgctgctggctgtgaagaacgatgc

SEQ ID NO: 362 - DNA, 412 bp, Lilium asiatic
gcttgaccaaacataaagacacgttcgaccgcctccgcgacgcgacatcgcatcaaggggaaggtgcacatacacccacgccgggaatcccactaccctgcatcggcaaaaccactcttgcacatgactaggaaatcgtcaagattacgccgtccacgctgcacgcaaccctcgcacgcacgtcctatacacataagcggcatacttaaggaaacgctccgcttcaaaaacggcgtaagacaagtaatctctcacggagaccggtattccaaatccgtcctaaatcgtaatacgacaacatccgttatcgaccacgctctacccaccgtacaaccaaatcaacacatgcgttatcgttaacgccggactccaccgacgcctcaccgttacatttaaaacgacattaaaacgc

SEQ ID NO: 363 - DNA, 401 bp, Lilium asiatic
ggacgcgtgggttttaaagtatgaaatctagaggataaacttatgaaaacacacggggagtacacacaagtgaaggtcaaacacaacagtaaagcaaacaggacgtatcaccctaataggtgaatgacagggcagagtggtcttgctgtcgcagagaagaccggcacagaaaagcaccatatcctatggcggagctacatcctcttgtagagatagtttgcaagtgagtcaacgggttttttgctcccatgcttcgtttgtcggcccttcaccttgatgcgtaccaggtaatcagctgctatccatgcaaagctaagccgggcaggaactggatcgccttctggctcttgtagttcaccggatttcttgacccaacgagggtgataagtacttgataccat

SEQ ID NO: 364 - DNA, 270 bp, Lilium asiatic
cccaactcagatctgggtgctttctgttctgacagcattgtatcaagagctggatgaaaaaggaaatgaaattgagaattcggagtaccagcggaaaaaagaagatgacctgcaaaaaagaatatctgaagttcactcaagcgttcatcatcttgagttgattgagaaggctaggatcaaagttcagccactgcatggactcgacatcaaacgggcgatcgctggcacttcttcaagggctgatcttgatatcccagaatctgttggtct

SEQ ID NO: 365 - DNA, 282 bp, Lilium asiatic
cggacgcgtgggttttaaagtatgaaatctagaggataaacttatgaaaacacacggtgagtacacacaagtgagggtcaaacacaacagtaaagcaaacaggacgtatcaccctaataggtgaatgacagggcagagtggtcttgctgtcgcagagaagaccggcacagaaaagcaccatatcctatggcggagctacatcctcttgtagagatagtttgcaagtgagtcaacgggttttttgcttccatgcttcggttgtcggcccttcaccttgatgcg

SEQ ID NO: 366 - DNA, 352 bp, Lilium asiatic
tgctaatcaccaacgacgacggcatctactccgtcggactccgcgccctcgtggaggccgtcgtctctaccgatcggtaccgcgtttttgtctccgcccccaattcggacaagtctggagtgagccactccttcacctggcggccggcgctctgttgcaagcgtgttgagatcgaaggggccacggctttttcggtcacaggttttctcgtttttcagtttatgatgctaattttttcatatttcgactaagttcatgacatttaaatatgctccatatgtctcgacttccaaattatacgcccataatcattctttcaatggcgtttcacgagaatcaacaacaattactg

SEQ ID NO: 367 - DNA, 399 bp, Lilium asiatic
tctatttaaagtccgaactaccctcgggtgcggcaaaggtgggaaggggtcggggtagggtggcgttaagtgttattgtaaggcgtcgagggataatacttagggtactattaagttggtgactaggtggtcggtatggtgcggtggtgcgaagaggactagtgggtctactcacgaagagattagaggagcgtcgaagacacccccggagaacgcgacttgcgacgtcgctattcatatagagtacgtgtgttggaagatagcgatggtgacggacgccgcgcacgtctctaagtgttaaggttgaatctcgcatgggcctggaggccgactcctcctctcgtcacttcagctccgaagacgtcgcccccgccagtcgcgaacgccggccctcgtcgc

SEQ ID NO: 368 - DNA, 391 bp, Lilium asiatic
tgctagtcaccaacgacgacggcatctactccgtcggactccgcgccctcgtggaggccgtcgtctctaccgatcgctaccgcgtttttgtctccgcccccaattcggacaagtctggagtgagccactccttcacctggcggccggcgctctgttgcaagcgtgttgagatcgaaggggccacggctttttcggtcacaggttttctcgtttttcagtttatgatgctaattttttcatatttcgactaagttcatgacatttaaatatgctccatatgtctcgactcccaaattatacgccaataatcattcttccaatggcgtttcacgagaatcaacaacaataactgagagtaccaaatcaccaatggtactcatttcatgtaaca

SEQ ID NO: 369 - DNA, 462 bp, Lilium asiatic
tctggacctttgggctgatttatgtgcttgtttatgtgcttgtttatgtgcttggccccggtagaagttacggttgacgatcctgatcgtgtagacaaagccttcttcctgcctgactgtgcggcatatccataaacctaaacgtaagtacccgacgccattactgccccccatccagactcgactccaactgaccttcgtatgacgccttcttccttatgcccccgatgaaccaaccgggctccgaagccgcagactgaattccgtatgcggctccgttgtgccccacctctagacttccggaactaccagtaaccccgtccagccccctcactcctacgacgaaaacttacttgagccccctaacgccatgacctcaacgccacgaacctagcgaaaactaaaccaggaacttctcaccaccccccaacccaccgcctagtctcctagtcaggaccccga

SEQ ID NO: 370 - DNA, 436 bp, Lilium asiatic
ttggctgatgtagtgcatggaccgtatattcttataccgtcgcgacccccgtcgagacttcgattaagactgatacgtgtctcggcaaggaaaccgagaaggagtttaagcccccgaagaacggcgacgtcggacctgcgaagacgaccttgattaagttcacggcggcggagatccctcttgagcacttcttgtccgggtgccccgtcgccagggatacgtgttagatcgccgtcgccggggccaccaagagcgccgagaagaaggactttatcggcgttaaggcgattaaggtcgtcactaagaagaagcgaggcgcctcctcacccacgcttgagccctccaagaatcgtaagagctcagccggcaacgtccgcccccgcccgctgaatccctgcgccgccaggctagcggccccgactaaatcacccgcccc

SEQ ID NO: 371 - DNA, 326 bp, Lilium asiatic
atgcgttctggctgctgttagagcgtgttctacatgtaatcgatctcaagaagctgtggaggagggttaagctcatcaggctggctcgtggggaaagagggtggatgttgatggatatgcttgtacacaccaggttgggagcattcaaaattctgattcaatggaagatcgtccattagagcatgaagccttggagaaaactgcacacaatgtcttagttccagaagagaaaacggtagataattgagctttttgcaagttcaccttgccaatgctccccatgatgctccgttctcatcgcttggggatgttatgccacatttgct

SEQ ID NO: 372 - DNA, 327 bp, Lilium asiatic
agaaaatcagcgactcaagatgaagctgcttctttttccggcactcctgctgatcgtctccaccctcgccgttgacggtgctgttgtctatgatgcctccgggaacgcactcaaacctggcagtacctatttcatcaaatctgtcttcagaggggccgcaggcggtagcctgtaccccaattggtgcaaaaaaatttgccccttaatctatcctgatatctgccagcttaatgtcgcccagactagcagtgacctcgacgacggtgtacccgtcatcttcactccggcgaacactgacgacaatgttgtccagtacttgagtgatgt

SEQ ID NO: 373 - DNA, 353 bp, Lilium asiatic
tgcaaatttcccgagaacgcagttgttctgtatgctgagaaggtgaacaaccggtgtctctgtgccgtggctcaggctgagtctctccgttacaagctccttggtggccttgctgtcaggagggcttgttatggtgtccttaggttcattatggaaaatggagctaaaggttgtgaggtcatagtcagtgggaagctcatggcccagcgtgccaagtccatgaagtttaaggatggctacatgacttcttctagtcagcctgttaatgaatacattgatgcagctgtaagacatgtattgctgcgacagggtgttcttggcatcaaggtgaagatcatgcttgattgggatcc

SEQ ID NO: 374 - DNA, 355 bp, Lilium asiatic
  modified_base (288)..(288): a, c, g, t, unknown, or other
  modified_base (308)..(308): a, c, g, t, unknown, or other
ctcttcctttgataaaacagtccatgtttggtccctgcaggatttatctcttgtagaatgtctgaaaggtcatgagcacaaagtcatggctatgacggttttggatgtaggcgagccattctgcattagtggtgatagtggaagtaacattttggtctggagagttgataaatctcttgggtcagaaccattaaagaaatggtctgagcataatgattggcgttatagtggggttcactcattggctatttctggaacagaatatctgtatagtggcagtggagacanatcaataaaagcatggtctnttgaaggattactccttttatgcacaatgactggtcatagatcaact

SEQ ID NO: 375 - DNA, 359 bp, Lilium asiatic
gcggcaaacctactgagtgtgagcgtctgccctctgctcatctcacatggctggcgggaaggtcttcggctccgcaacatcgacagaagtcgcgagggtcctgacttgcctcttcgagaaggatgtcgagttccaaatcatccgcattgagaacttcaagggtcaggagagaaagcctgactacctcaagttacagccctctggccaagctctcactttcgaagatggaaagatcacacttgttgagtcgagggcaatatgccgtcacatagctgagaagtacgcggacaaggggaacaggcatctgattgggacaggaacgctagagagggcgtcgatcgagcagtggctgcagactg

SEQ ID NO: 376 - DNA, 417 bp, Lilium asiatic
ggatcgtcgagtccaaccgtgctgtccgctacatcgactctgaccattacaccgtgcccgaaggaaaacgtgccatggagcttctctctggcaaggagggcattatctctcaaatggtcaccaccaccccccagaagccttacagcctgacatttgccgttggctctgctggtgatacctgtcaggctccgttggccgtcatggcattcgctggtgaccaggcgcagaactttcatgtgtcgcccaccggtaatgcaactagtcagcttgtgagtctgaactttacagcgagggcggagcggacacgggtggcgttctacagtgtttactacaatacgaggagtgatgatcggagctcgctttgtgggccggtggtggatgatgtgagggtgttgggggtggatggttccggcggtg

SEQ ID NO: 377 - DNA, 240 bp, Lilium asiatic
gaaaacgtgccatgggaggcttatatctggcacagaggccatatctctcaatggcaccacacccacgactatcttacatgcctacacttggcaggatcatctcgtgatcatactccgtaggctacggaagctctcaattgacttctctggataccacaaccatgacttggatttgtcagaacaccatcatcttactcatcaactacggaggatacacatttcaggtcgagatccatgacc

SEQ ID NO: 378 - DNA, 429 bp, Lilium asiatic
  modified_base (415)..(415): a, c, g, t, unknown, or other
cccacgcgtccggtttgacaaaagtgccaatgatgatcacgagaggagtatcttgagtagattgaagcagcaatgtggggggcagtttacgtcaaaaatggaaggcatggtaactgatttaacactagcacgagaccaccaaacgggtttcgaggagtatctaaaccttaatacgcatgcacatcctggaattgacatgacggttactgttctgacaacgggattttggccgagttataaatcttttgatctcaacctttcagctgagatggttaaatgcgtcgaaagtttccgagagttctatcaaaccaaaaccaaacacagaaagcttacatggatatattcattggggacttgtaatgtcatcgggtaatttgaagcaaagcccattgagctggtcgtaacgacttatcangcgtcaacattggt

SEQ ID NO: 379 - DNA, 146 bp, Lilium asiatic
  modified_base (59)..(59): a, c, g, t, unknown, or other
tcacttcacctccccctccatcttcctcctcttccttataatctcccccctctccttcnacctcctcaacattttcatcttcctctccattccttttcacaattactactatttccacttctttctcttcaccttcaatttcctct

SEQ ID NO: 380 - DNA, 299 bp, Lilium asiatic
cggtcggaattccggggcggatagggcgcgacggcgcgcacggccgggttctgcagcgattcgtgcgcggtgagccgccagtcggggatggcgccggacggcgagaagatttccacgtgcgcgagcaccgacagcatccggtcgcgcacctcggtgcgaaaaccgttcatcaccgacagcacgacgatcagcgctgccacgccgagcgcgatgccggccatcgcggcgccggcaatgaacgacacgaagccgtcgccggccgagcgccgggcggcgcgcgcgtagcgcaagccgatctg

SEQ ID NO: 381 - DNA, 340 bp, Lilium asiatic
  modified_base (34)..(34): a, c, g, t, unknown, or other
cgaaaaaacgtggatcgtgccgctcacttcgtcntgagctgcggcgtatgtcttccactaaggttaattggacgtcttggacggcagtcggattcgcagcaagcgtaataactctaatcatttcccttgtattgcgcgtaattgcaaaggacgcgcagtcgagaaacttataataagtaatcagtcccactcaataaggggcgctgatatcgagaaaatcagcgccgtacacgaggtactagacttgccccgccgcccctacgtatcagaccgaccagcccggtaggattgatcccggtgaccccgcccggcatgttagactccgtaacccaaatccccg

SEQ ID NO: 382 - DNA, 448 bp, Lilium asiatic
tttggcgctgtttatgtgctgttattcttgactcggatcctacacctctttcatcaactcgcgacgacgtaagcgaggccactaataggtccgatcccttaacccttcggaggcctcgactctccccctaccactcctctacccgcccccactagtatagcgacgcccgtaataatccataccgcgcggaaagccggcgtaacttaccctaacgagcatcgagacgcggcgccaagaacccattacaaaaacagacagcccacccacaccctcagataagtcctggtcgtccgaatcgacgacgccgacgactagcccccctataccccatgcgtcgagacatccccccccgctaagccaaccaccgccacaaccaccaccccacaagtcagaagagagacccagcctaaggcggacgcagaacataacacacaaacgtctaatagct

SEQ ID NO: 383 - DNA, 389 bp, Lilium asiatic
ttcactcgtttctcacgtcgggctccttagaaagggtgggcgcgaagaactggttcctcttacgctacggagagaaaaggaactaaagtttacgactatggccgacgactcaactcccgtccgtccgtacgtacccccaagcgccccttaagacgatacagaaatcagcattgaagtactcaaacacaccccctgagacactagaggaagccgaaagacgccacacttatgcgagccacaggatccaccacactaaccaaacccccgaccaatcccacgcaacaacgaccccgcccgccgaccgccaatccgtcgcaaacacccaactacgaccccaccccgccatacacttcaaagtaaaagttacgacgtctcggtgcgtaccgtcc

SEQ ID NO: 384 - DNA, 442 bp, Lilium asiatic
tttgggctgattgtagtgcttgtgtatgtgcttgataagaaatcgttaccaccaataaaagaataaaaatcctagccaacgacgaaaacttcccggaacggggcgacatattctccagtagagtcccagaaaacaacgaagcgtaaagacggaactagggaaatctcggagacgcggacaacatcgataacttacgggagcgcagcgccatctacggaaacggaagaccaatcgataacgtccgggaaggcggcttcgccaagctccggggccggaacgaaggaagggactataattagcgcaaggaccggaacctcgaaaatccataggacaaaggacggggcaaagttagggatagcctccggcgttagtagtagctaaacaacccggtcaatcccggtaatctcctccggtaacgtaaacttagctaatagaacgcaat

SEQ ID NO: 385 - DNA, 274 bp, Lilium asiatic
agaagatgcggggatccccctcggcttctcgccggtcggctcccctcctggggtcggctgctgctagtggcagtcgtggatcgttggctgccacgggctctggtacaaccttgcgctgatcatccccacggtgttgttcattgcgtacctcgcctctcatgcacggaagagcttcgcgaagctcacgtatagccgatcgtacatcatgattgcgtactacgcgctgctagggatcgactgtcttcttaatctcgcctggtgcgttttacaggct

SEQ ID NO: 386 - DNA, 437 bp, Lilium asiatic
gaaacacgtgcgcgccgtcgctaacaccaccgccagttcttcgtgatggtgcacgtcatcttctgtgggaactatggaaaggccgggaagaagccccgtcgaccctacgagaaggagcgtctagacgctgagctgaagctcgtcggcgagtacggactccgatgcaagcgcgagctgaggcgtgtacagtacgcgctgagccgcatccggaatgcggcgagggagttactgacgctcgacgagaagaatcctcgccggatcttcgagggcgaggcgcttctccgccgtatgaatcggtacgggctcctcgaggagggacagaacaagctcgattacgtgcttgcactcaccgttgagaacttgcttgagcgccgacttcagactcatgtgttcaaatcgggcatggcgaagtcgatacatcatgctcgtggtttgat

SEQ ID NO: 387 - DNA, 359 bp, Lilium asiatic
  modified_base (291)..(291): a, c, g, t, unknown, or other
  modified_base (293)..(293): a, c, g, t, unknown, or other
cccacgcgtccgattttgccggcagtagaccttatcggcaagcacatattggtttgcatgttttacttcatcggatgtggtttcttctgcattgagtcactgatgagcatctgggtccttcagcaagtatacatgtacttccgaggtagtggaaaagctgcagagttgaagcgtgaggcagcacgtggtgccttgagggcaacgctatgatacaagcgcttaccacaggttcggtgacgaagttgcaggtttcgatagcgatgcacaatgttaatgataatgtaatatttngnttggttttttgggatatatacttaattggtgcgtaaagttgacacatataggaatttcatggagat

SEQ ID NO: 388 - DNA, 383 bp, Lilium asiatic
gcggtggccatgagcatcaaggagtagatctcgtaggataaacggtaggtgtttaggccgccaaaagaggtagcttgggggagaccggagtagtgtcgctgtaggtagctcatattgtagggcctactgttgcctggcagttgtaatcacgtcagatagcgatgataaatccctctgactgtatatctggggcgatggtaagttgctccgatatggagctgaagaactggtagaccttttgacactctcgccaagccatctagtactcatgggtggaaccagaaacccaaattttattgagatcaactcgatccaacacaattataggtggttgaggtgttcgaagaatgaagtgctggcgcactgagtagttcacacttggt

SEQ ID NO: 389 - DNA, 431 bp, Lilium asiatic
gcgctttgttagtgttattctgggcagatatatatcatcaggctagaagccttcgaacgtacaagctcagacgtgcgatgtttggttatcaacggagcagtatatatcatacaggtatgcatttgggtttatttggagattagtccaaagcctattgctgtggaacttgctaagcttttcctagcagctgtctcattcttcgcggccctaggattcctgatatatggtggaaggttgttcattatgcttaggcgcttcccaattgaatccaagggtcgtatgaaaaagctgaacgaggttggctttgtaactggggtctgcagcacatgcttcttgatcaagtgtattgtgggtgctatttctgcatttgacaaggatgctgaccctgatgtcctcaatcatccaattttgaaattcatttaatatatggt

SEQ ID NO: 390 - DNA, 248 bp, Lilium asiatic
ccacacttcctctcaaatccctctcctctttttaacttcaatcttcaatggcgcccaattctggtagcaaacctttgactgaggggaggctcttctactatgataataagtctatccctgcatagaataagcctgcttataataaccccaaggcaggtaataacgttcttttcttcaatgatggtgcctcttacaagaataataatatgtctaataagtcactggagacctacaacatctacatcttc

SEQ ID NO: 391 - DNA, 366 bp, Lilium asiatic
ataaatacgccaatcctatcctcaactgtccatacccaacggagctccgtccttgcaccgcctctcccacccagaggatatgccggtagccggaccgtacctgctgtcaccgcttcgtggtctcctcctttctcataccctttagaccggtcgaagtcgttcgtagtaccgacctcctcctctgcggccgtcttcaatcctcccgtcggttaccacgcgacgtgcggcaccacttgccgtgctgcacgctcagctaccggccgtcattctccgtaagagtatacctgcctactgagtggtcctacgaatctgcctattaagaaaaaccgtacccctaatcctaccggcaccacatcctcatcggcc

SEQ ID NO: 392 - DNA, 445 bp, Lilium asiatic
ttggggacggttctaattcttcttcttacccctctcacacttctcctacttatttccgccgacgttcacctcttaagcttgggataacttttataacgcgctcttttcttattcgcctatctcttccggaagattatcgtccctcgctgtaggaccgtaagtaaccccacggtaacggtcattattagagaggtatttgtagtacaagccgttatgattgagtctctcgccgttgagatgttagagaccgcgaagatcacctaagaagtccgcgataaagccgaagataaacacgtagcgagcctatcccttgcaattgccgcggccgtaccgtccggtctagtcggtactactctactaaccgacaggtccttcccaaccttcgcggcctccgatgctgcacgtacccctcataacgggcggcccgtccataacaattcacccc

SEQ ID NO: 393 - DNA, 415 bp, Lilium asiatic
  modified_base (278)..(278): a, c, g, t, unknown, or other
cgtccgcggacgcgtgggtgttgctaaacgcatgtctgctgctacgaaggtgaagaaagcggctgggaagccgaagcctaaagctgctgctgtgaagcccaaagccaagcctgccgcacctaagctgaaggctgtgttgaaaccaaagcctgttgccccaaagccaaagactgctgctccggctaaggcggtgaagacatctgccaaaccttcccctgcaaagaaggccgctccggtggcttcgaaaaaggctaagccggtgaaaaaagcaacaactnccaagaaaagcgagaaatagatttatatctggctgccggggtgaagtgatagatagcctggatgttttaatatgggtagtttggagacaatttgagcacttaaaagccagtcattttcttaatgacaatattttatt

SEQ ID NO: 394 - DNA, 453 bp, Lilium asiatic
  modified_base (388)..(388): a, c, g, t, unknown, or other
ttcccgggtagttgctgggttatcaacgattgattgttctttttgttcaagcgtaaatggctagatactaatagttagacagagggtgacaaactagggctcatttttattgttcttagaaaaaatgtatggataatagaatctttcatattataaatatttatgaaacaagttttttacataaaatataagcttagcccgggtatgtgtattgtgttatttgctcttgtaaaaagtctttaggaagatgagggtgatattatctatataaaatatgaacgccaaactactccacttagaatacgtattattgatgatgtatattttatatattgattaaattaactggaagtttcaagggagtatgaatatgtttaatttcatattntgatattttaataaaattttataaacttatggagttattgatgtaaatataatatgaatttgata

SEQ ID NO: 395 - DNA, 253 bp, Lilium asiatic
cccacacattcgccgcgagactggagccagacattgtttagatgtgtaggggtaatatatatagcaagaggatctataacagcagcaagcttcatgtcaccttctgcaagcgccgcaatggcctgctcaagaaggcctatgagctctcggtgttgtgtgatgcataggtctctcttatcgtcttctccaccctcggccgtctctatgagtatgccaacaatagtgtgaaagggactatcgaacgttacaagaa

SEQ ID NO: 396 - DNA, 399 bp, Lilium asiatic
  modified_base (24)..(24): a, c, g, t, unknown, or other
gtctcagaggacttaagtgcctgnctgtgcgtacgtgatgctacagtctcgtcacagcgctattgcaggcgagacctatcggttgctgccccataatgctgcgatcgggaaaatttcggtgccatttaatccaactgttccgtagtatactttttccctgttagtcggtgcaacagtgaagaggtttgtattgactgtttcctttaatagccgtgtagttcgaacggtgaacgggatgtgtttcgcagtggtgtaccaagtgtggtgggcgcggcggccatgtgtagtgcgattgtcatatccgttagtgtttcagtgtttgtcttccctgtccctcctttccttccctctgttatgcctgttggtcccttttgctaagtctcaaactggcggtctttc

SEQ ID NO: 397 - DNA, 387 bp, Lilium asiatic
gaactttgggctgatttatgtgcttgtttatgtgcttgcaccctcccgctcccccaccctcctcctacctaatacttcccacttggtctacactcgatcatactcgctctatttgctaataacggccaatttaagcatcacaatctttttacttcttgaagaatatatcccctacaacgtcaccgaactccttctctattaaacattattacttctaaataagagctgcggcaggttttccggacttaagaataagttaaaaacattttctgccaccaattaagacagtgactccgttccgaaatttactcctacctaagctttgaaaaacctcgacgccaccgaggttgcggcttaacccgtgtgttaacgctaagccagtactat

SEQ ID NO: 398 - DNA, 466 bp, Lilium asiatic
gacctttgggctgcttgtagtgcttgtggatgtgcgggtggtagctggtcgtcgcacaagatccctgagtctcttgcgtcccgtggcgttgacgccgtgtcgactagtcctctatttacgggtaactctcgtgagcctcttagtcgtagtacgtaaagcatatccgacaaccccgcgacgtacgagaaagacactgatactagtaggttcctagaagaaaacacgtagtagtaaacggaacgcgaactcgtggactctacgaagagtaccgaaacttccgaagaccacaaacggaagtagccgcgcgaaaactcggaaatacgcctaaccgaagaatcctacgaaacagagggctagccagagtaaaacccgagaataacaagataaaagaagaactatactacactagagtaaaccaagtagccgaaagaaaaggagaggacctcgccggagaagaacgtactat

SEQ ID NO: 399 - DNA, 244 bp, Lilium asiatic
  modified_base (14)..(14): a, c, g, t, unknown, or other
ttaacttacgcttncgtcgtcatctggcgatctccaaagattttctcgaattgctattcctcttgttgttgtatctctatttcctgttgctgctatcttcttctctttcacaatgtcaatcttgaaatttccatctctttctctcgttttaacaataataatagtatttaacaacgtaactttcttcaaaaaagcttcgtcctttactcgaccggctatttaacaaacggaacttgccactacc

SEQ ID NO: 400 - DNA, 256 bp, Lilium asiatic
  modified_base (209)..(209): a, c, g, t, unknown, or other
cggcgggccacacgtacggtgaagaattgatcccggaatacgttagctttgtcaagggtattgtcgattctgaggacgttcctatcaacagttggagggagacgcttcagcagaacaagatcctcaaggttatccgtaagaacttggtcaagaagtgcattgagctcttctttgaaattgctgagaacaaggaggactataacaagttntatgaggctttctccaagaacctcaagcttgccattcacgaggactc

SEQ ID NO: 401 - DNA, 169 bp, Lilium asiatic
aggaccgataaccccacctattgcacagcgcattctagttattctgaaactttgtcttattactccataagggtccccatatctcatattgaaaatcgaaaataaattacctctttaatgtgaactaattccaccaactccttcaagttcgtatataaggcataaacca

SEQ ID NO: 402 - DNA, 330 bp, Lilium asiatic
gaggagtctgcttcataagatattcctgtgtaggagattgtagctatgaccgaagatttaaatacgccgaagcatgcggaataagaaccggtgaagagaaaggggaagaacgccgatgtcggagacaatgaggacaaggacttggctgatgagtctcacgctactttggagtactctaaggcgaagaagaggaatctggaggagagcctgatgtagcggatcatcgggaccgttgaagcctagtcattcaccgaacataagccgaggaacacttaacaaatagaagtcgttaagaagtcctcgtaagagaagaggtctgtgggcagaatc

SEQ ID NO: 403 - DNA, 428 bp, Lilium asiatic
gggtagctcactcctgcactgaaacaaatcatcaagctatgatctctacaacgacatatgtgcactttggtagtcatttccgttgcggaacttggtgttattcccttataacaaagatatgttgtttatttttgtgacaatattaaagcccttcacattgacaattaatcattggtccaggatcacactaaatttattgaaaaccacccccacttcttgctggagaaagtgcctcttgatcactcgtcatcaagtttgtcccttctacacatctactggttgatcggatagggtcccagcatgagatggctacactgcacatacatcttctgtacactattgcatgcgtgcttatggagactacgaatcgtagaaaccaatagtgtttgattaagcaatcaggaatttattggatgcaatatttttac

SEQ ID NO: 404 - DNA, 392 bp, Lilium asiatic
tcgtggttatgctcctgtcctgaattgccataccgctcacgttgctgtcaagtttgctgagatggggaccaacatcgacaggcgctctgagaaggaaatcgagaatgagcccaagtttttgaagaatggttatgctgtatttgtgaagattacttctaccaagcctattatcgatgagactttttctgaggatcctccgattgcgcgtatagcgtttaagaacatgcgccatactgttgctgttggagctataaagagtgtatacatgaaggaaccaactggtgcctaggagacaaaggctgctatcatgaataagtagacgcggcattcaatttatgtctggagatactaagatcttcaagacaaatgttttgaatgcttgtgcctggata

SEQ ID NO: 405 - DNA, 208 bp, Lilium asiatic
acggtttggtgcctctagctctaaggatcaccatgcctacgtcgcagcctacttcactttacagggtatgatcatgaaccaagcttgccagatcgataatggttatgctcctcagctatatcggcatacatgtcacactgctgtcaagtgtgctgatatcctgcccatgatctacaggtgctcttctaatgaaagcgaacaggctccc

SEQ ID NO: 406 - DNA, 411 bp, Lilium asiatic
catccgtgttcttagttctatcaaaccgaagcttgctgtagcaccatttctgaggaaggccagtgtgagcagctatgatgggaaggatgatgagttatcgaagcacacacctctaacgatggatgcactctttgcggatatgaaggaaccgaggatgagggccatgttctatcaagcgatccgtggaactagccgatctttagctcagaagcggcggccacagccacatcaactggctagtggtcgcccagcaccttgtaacactggacgccgcactggtgtactttacaaacgaagatattgactgaagtatagagctacaccaattatcatttgtaaaaaacaacagtgcggattcaatcgaacgcatcgcttgaatcatatgtgggcagggtaaggatggcaaggggc

SEQ ID NO: 407 - DNA, 287 bp, Lilium asiatic
acgcctacacccactctcacacttccacacaatcttactctatcatctataccactacatattggatggtcttaaataaacgcaatttacacaccctccttactcaactaccattactgacatataccttattgatacctcaatcatattacaaacttcacacttgcttatttaccattttaccttgataacacttaatttattgtcttcctcccttaataccctctgcacacccttaattaataccaccactaactcaaaagctttcatttaaacttcaattattc

SEQ ID NO: 408 - DNA, 263 bp, Lilium asiatic
aattcccattcgacccactcaaactcatgcacctacgcccatccttccccaacttttcactccatcatctctaccactatatacggtcttgttcacaatctacgtgctgctttcctatctacatattactattctttctactaacaatatctttcttaacaatcaatcattataccactctatcttgactattattaacaccactacctattcacttactatcatctcttccccttcaaatactcacaatacacatcatctta

SEQ ID NO: 409 - DNA, 335 bp, Lilium asiatic
cccagatataaatcatgcgactattgatcgactgcaccgcatcttctcaaacgccggcgggggtgaccacatgggccacccgtcatccaacacgccgatccttgactcatccgaacaagtttacatctactctctcaccctcctcaagattctcaaacacggcagacccgattttccaatggatgcaatcgagatgatgctcggcgaatatgctgatgactcctcaatgaggatcttacatgtatttgacaattctcaaatctagaccaccgtcactctatatgctgttgatcatgtgttccagactaacatgctagatatgcacaagcagactg

SEQ ID NO: 410 - DNA, 384 bp, Lilium asiatic
acggagtccatcctcagaatcttatacgatgttacagaacagcaagtaatttgtgaatcaacaaaattaaagagcttgcctctagtatagagggaaagagtcttgaagaaaagaaaactttattggcaaaatgtgctgctaccacactttcatcaaaactaattgtcgtggaaaaggaattctttgcgtcaatggttgtcgatgctgtcattgcgattggaaatgatgatagactgaacatgattggaattaaaaaggtcccaggaggtactatgctgtattcgtttcttgtgaatggtgttgcttttaaaaagacattttcttatgctggctttgagcaacaaccaatgaagtttcttaacccaaagatacttttgttgaaca

SEQ ID NO: 411 - DNA, 326 bp, Lilium asiatic
acgcttaagcctatattacgccaacacttctcctacagctcctctgccatacttagcgggtgggttcttctgtaatgggaggttacgattaaacacgaacgatccttctcttgaccctaggagtatcgtgaaccatctagtcatcaacagcatccttcatatcaacatgctgccttctgattcaccgaacatctcgtctcaccccgtgaaatatcaacatgatcctactctgacagatctctctaactcacagtttctcaactgtaagaaccacttaatgtatctcgctacatatctcttactactgacccactttcatgatatgg

SEQ ID NO: 412 - DNA, 416 bp, Lilium asiatic
gagctagaaaggatgtttgacctcaaaggggagctccgtgaccgtggtaaatgggtaggggcattcactgatgatgaggatgatatgatgcaattagaagacgatccttggcgtgaattctgtgggatggtgaggaaaatattcatatattctagtgaagagatgaagatgatgaagcctaggagcaaacatgtgatgttatcatcggagtgcgaccaaactggtagcggactcactaccactcgtgttcaacaaatagaggtctaaccttaaatttgaatcacagccctggactggatggtgtggtatcattactctaatcattagttctgattaatatcttgatgggtgattcaactggtatcagaatatctagatgggtgattcaactataccagcaagatagtttctgattc

SEQ ID NO: 413 - DNA, 187 bp, Lilium asiatic
acgacttgttgcctgtaactccaaggatgacaatgccaagtaggcggcctactgcacttcccagggcaggaacattaaccatgctggccagatcggaaatggttatgctcctctgctggattgccatacctctcacactgctgaccagtacgctgatatcctgaccatgatctacaggagctctcct

SEQ ID NO: 414 - DNA, 397 bp, Lilium asiatic
tctctctctaactcgagcttatctactgcatttctccttcgtctcatcattctttctatcaatagagaacagaaagagatgtaggaaggaagagctcgggttcaggacacagatatgccggtgaagatgcagcacgaagccatgtcggacgcctctgcagccctcgatctatacgacgtcctcaactgcatcagcatagcctctcacatcaaaatggtatttgacaggaaacatggactgggctggcagtgtgcggtgggatccaacttcggtggcttcttcacccatacccaagggaccttgatctacttctgcttggagaccctcaactttctcggcttcagagtagcttcatctaaatgattggatcttcggtgtattatgactttagggctaa

SEQ ID NO: 415 - DNA, 386 bp, Lilium asiatic
acgccgaaacctgagcccatcatacgcgatctttcgcctccacctcctatgcctggctttggggctgcgtccgtttctacggcgccttcccaagggacctcgagcgagtcttctgatgaccctgggagtctcgtgaatcaaagtggtagcaactctgcccagcatatccagagcatgccttcgtattcaccggccatctggtctcacccgatgaatccgcaccgtgatcctgatatgaaaatgatgtctaactagaagttcttcaaatgtagggagctgaattggtatttctctcagtaggttgtagtattctaccagtcttaggatgtggatcgagactagtccgatttagtacttcaaaacttttctaatagcagacttctatg

SEQ ID NO: 416 - DNA, 385 bp, Lilium asiatic
acgccgacacctgagcccatcatacgcgaactttcgcctccacctcctatgcctggctttggggctgggtccgattctacggcggctttccaagggacctcgagcgagtcttttgatgaccctgggagtatcgtgaatcaaattggtagcaactctacccagcatatgcagagcatgccttcgtattcaccgcccatctggtctcacccgatgaatcctcaccgtgatcatgatatgaaaatgatgtgtaactagaagtatcttaaatgtacggagctgagtagctattactctcagtaagcagtagtattctaccagtcttaggatgtggatcgagacttgtccgatttagtgcttccaaactattctaaaagcccacttctat

SEQ ID NO: 417 - DNA, 447 bp, Lilium asiatic
acgcggacgcgtgggcggactcgtgggttcaaatttaccttcatttccatatgatcctattggggggccttacgaggaaaggccctttcctcatataccgcgtgctcctctttttgaaagaatgccttctgccccatgggctccccatggcatgcaagatggtgctggtcctatccctattccagattttggcggatcaacctctccaaggagaactggtggattccccagcggatatcatccaactgttaccgtaaatgtcgctgatcctcgcgctcttgtgccttctatctatggagaggatggttcttgcttgaatcgtattcatgagatatctgacgcaaaaattaccatcaccgaaccaagacctgaagctacagagaccgttattataatatccggaataccagagcatactcatgctgcacagagtcttcttcaagcttt

SEQ ID NO: 418 - DNA, 323 bp, Lilium asiatic
caaacacataaatcaggccacgattgatcttctgcaccggatcttatcaggcgcgggcgggatgaccgacatgggcggcccgtcgtccgacatgccgctccttgacttgtctgaacaaattcacatctcctctctcgctctcctcaagatgctcaaacacggcaggtccgatgttacactggaagcgatggggatcatgcttgacgaattagctgatgagtacacaatgaggattgatgatgcttttgcaatgcctcatatcggtactcgcgttagcgtccatgctgtttatcatgtgtttcagacaaacatgattgatatgc

SEQ ID NO: 419 - DNA, 440 bp, Lilium asiatic
caaaaaaagaaatcaggcgacgatggatcgactgcaccggatcttctcaggcgccggcgggatgggcggcatgggccagccgccgtccgacgcgccgctcctcgactcgtcggagcaggtttacatctcctctctcgccctcctcaagatgctcaaacacggcagggcgggtgttccaatggaggtgatggggttgatgcttggggaatttgttgatgagtacacagtgagggtggttgatgtgtttgcaatgccgcagagcgggacgggcgtcagcgtcgaggctgttgatcatgttttccagacaaacatgcttgatatgctgaagcagactggaaggccggagatggttgttgggtggtaccactcacatccaggctttggttgttggctttccggagttgacatatatacgcagcagagttttgaagctttgaacc

SEQ ID NO: 420 - DNA, 328 bp, Lilium asiatic
ccgacgcatgcatagcaacaactttaccatcaagcctctaataatgactatactggaaggggtattctaacatgtgagcatatgaattatcattatgatgcattatctagcttaaccaatgatgatgctacatctatttattaaccgcactctaacatatgataatactgactaattggctgatgcatcacacgtatccaaccaactctcattcaattcaaaatacatcaaaattgtactgtgattcacactatcaatcctctaagagaccttgaacatatgaagatacatgactcatattccgaatcggatcaaaattatgggacac

SEQ ID NO: 421 - DNA, 438 bp, Lilium asiatic
acgcatacgcttgggttatttttgagatttgcttatgcactcaatttataataaacagcttgggttataaggacggatgattttaggattacacatgattttaattttgttcttatgtatattcacattgccctatctatcaaatttaggtttatatatacacattttacccctatttggttacacctttttcaaaaaaacccctttatattttaaatatttatatacttatattgcactttctattaccaacttttaaatactaaaaataataaatattttaaaatgtatgtattattttcccccaagtctataaacttattttacttattagtttttaataacaaatcccccacaagagtcataaaacaaagatttcattatatgaatctttatatatcaagccaatctagccttaataatttttttaaatgattc

SEQ ID NO: 422 - DNA, 420 bp, Lilium asiatic
ctagagttagcagagtttcagttcacgtgtcaaaaaagcgctcccattcaaagtccagaagtgaaacgtaatacacatggagaggaaaaaataaagaagttcaaggctttttctgtgagttctgaagatagagatttaggcgggaacagtggtatagatgttaccatgcctgcttttgagccgtcaaagaattgttcaagctctgtattagaccaatgtgatgcaccagagacagatgcccatggcacggtcctggtctataatcacgacgcttgtgtgagtctcctcacgagaggctttaaagaaaccacagttactggatgggataattctggatcagaattatttcagcagcgtgaagcacagaatggcagcattggttatgtgctagatgaatgggacgaggagttggatcgtggc

SEQ ID NO: 423 - DNA, 249 bp, Lilium asiatic
ttaccttgcactttctagcttaaccaattatgatgctacatctatttatcaaccaccctaaacatatgacaatccttaataatttgcagatccatcttacatatcccaacaactctatccaattcctatatatctaaatattatttccgttctaactatcaaatttctaagatacctttaacctcttccatctatgacacacattttgtttcccatctaaattatcgaacacatcattttcattattta

SEQ ID NO: 424 - DNA, 385 bp, Lilium asiatic
gactttatcgagcggccgaggatcacagagatggagttagtcacgctaaaaatactgacagggctggggctgtcaaaaaggcatgtcaggcatatggattactttacacctgatacatagctcatgatactatgcaacggaactatgtactgtaattatgcatgtacttgatatcatatatcccgaatacttgcaacttccttactgtatgaacttgcatccagcgaatgtctctcctagtgagttacactctattggctgcattataagattagatgtcgaatgatgaacttgctatactaccttcaaactgtactaatagatcgcaaatttgttggtgataaatcgcttgatcttgtgatatatatgtaaggttaaagccata

SEQ ID NO: 425 - DNA, 384 bp, Lilium asiatic
acgacctttttcatgctggagaggctcacacaaagcccgttgctaaccctccagctgctgacaatgctgggactgttgaaaagccgtacggtgctccagctctacttgacaacggcaagcaagttcctgctgacatacaaggaaacactgcacggaacgcaaacaactacttcagagctgatggccagaatactggcaacttcctaacggatcgtccttccaccaaggttcatgctgcacctggtggaggttcctagcttggctaccttcttggtggcagtagcaactgatcgcatttctatgctgctttagaactgcaccaagtgattgcagatttctagttgaagagttgcttaatcatgtaatatatacctaaggccaagg

SEQ ID NO: 426 - DNA, 261 bp, Lilium asiatic
acggtcccctacacatcctccaacatcttcctatgcacaacaccatggggtttactgattgatggtgtgggctggatatatatatatatcagcctgtcagcatgtataatatctcagatgaacacattgctctgctgatacgatcaaactcagctgacgaagtcgcagagctctctgatgatagctgctagatggatgcacttcaatacagaagaactgtcgatgcgtaaatatgctgcatgataccgacactgcttaaag

SEQ ID NO: 427 - DNA, 435 bp, Lilium asiatic
aagatgcattacattctgcaacttctcaattttatttatcggggattctaaaggtttttggaaaagctcaagagactggagactaagaggtgatctgctgtctccattttacttcctgactatgatggaggtcctttgcttgatggtgaacatagtaaaagacggacttgcttgaaggattcaaaaattctcttcaaggcacccacatgactcatctgcaattcacagatgatacattattctttctggacagagatcccatgtccaaatattgaaagacattctaagcatgtttagcatctgctcaggcttgagaataaacttcacagaaagcgctcttttccatattggtgtgacatgataaactgaattgggcatcacaaatgcttggttgtgatgtgggaacgttgccaactttatatcttggattgcctc

SEQ ID NO: 428 - DNA, 110 bp, Lilium asiatic
acgctgacgcttgactctctgctactccagctttctcttcaacccctcatctcaactttccgggcatccttctactctctggtgacgcacacacatatccttccctccac

SEQ ID NO: 429 - DNA, 441 bp, Lilium asiatic
cggacgcgtgggcggacgcgtgggttcaaatttacctacatttccaaatgatcctattggggggggtcacgaggaaagaccctttcctcatataccgtgtgctcctctttttgaaagaatgcctcctgccccatgggctccccagggcatgcgagaaggtggtggtcctatgcctatgccagattttggcggagcaacctctcaaaggagaactggtggtttccccagtggaaatcagccaactgttaccgtacatgttgttggtcctcgggctcttgtgccttctatttatggagaggatggtttttgcttgaagcgtattcgtgagatatctgacgcaaaaattaccatcaccgaaccaagacctgaagctacggagaccgttattataatatccggaataccagagcatactcatgctgcacagagtcttcttcaagc

SEQ ID NO: 430 - DNA, 430 bp, Lilium asiatic
acgcgtacgcgtgggcggacgcgtgggttcaaatttacctccatttccaaatgatccggttgggcggcctcacgaggagggaccctttcctcatataccgggtgctcctctttctgaaagaatgcctcctgccccatgggctccccagggcatgcgagaaggtggtggtcctatgcctatgccagatcttggcggagcaacctctcaaaggagaactggtggtttccccattggaaatcagccaactgctaccgtacatgttgctgatcctcgggctcttgtgccttctatttatcgagaggatggtttttgcatgaggcgtattcgacagatatctgacgcataaattaccatcacctaaccaagacctgaagctacagagaccgttattataatatccagaataccatagcaaactcatgctgcacag

SEQ ID NO: 431 - DNA, 434 bp, Lilium asiatic
ccaacacatagattgctaccatctgagctataaccctttcataatgactatcctcgaatagttgacccaacatgtgagcaactgagttataatgaggatgacttatctagcttaaccaatgatgaaggtacatttactgttgatccacctgaaatatatgatagatatgaatatcatgcatatacaccatacatatatgatcaactctagatcaatccattatagatcaagatcttagattaattatacctatcgatcatctaattgaccttgaacctattcagaatgatgacacaaatttggatttagatcatgattatgggacacatgaattgcatagctcatgtaaaccatttaacgtggaacttaccgatataaatcttgatctaatagacatacatgagaactatcaacacagacataatacagattta

SEQ ID NO: 432 - DNA, 358 bp, Lilium asiatic
gccaagatatagatcgcaaccatttttccaataaccctctcataatgactatcctggaataggtgaaacaacaggtgagcaactgacttataattacgatgagttatctagcttcaccaatgatgaatgtacatcttttttttatccacctgaattatatgatagtccttgatattttgcatatacatcatacatatgttatcaactctaaaacaatccaatttacatcaaaatcttaatttccttatacctatcgatcatctaaatgacccttaacctattcgaattgatgacacaaaatttgtttttgatcaagaattatttgacacatgatttgcatgttttatgttaaccattt

SEQ ID NO: 433 - DNA, 405 bp, Lilium asiatic
acgcagaagcttgctaccgaagaactatgtaagtactacacgaaggattacggaattgaatggggtattaggcagggtcagaatatctatagtcctttcggaacatgtaaaggtggaagggagaaggctcctgctgctttctgtagaaaggctctaacttccgttgataatttataaatgtcttgagatggactccaaaccagatccttcacattcattgatgaatgcgtataaagtgtcctgagattgacaaaatcagacttctaggagccagttaacatatgaagagacgaaatgctgagcatgaatgaaatggccgaaatggtactcaacttctatgataagaatctttccattgagcatattcctgtccctaaaggtgttcgtgatctcaattttacaaca

SEQ ID NO: 434 - DNA, 480 bp, Lilium asiatic
  modified_base (408)..(409): a, c, g, t, unknown, or other
  modified_base (421)..(421): a, c, g, t, unknown, or other
  modified_base (423)..(424): a, c, g, t, unknown, or other
  modified_base (470)..(470): a, c, g, t, unknown, or other
cggacgcgtgggcagcggtcgaccggcatgacggtgacaacagtgaagatcagcaatgttggtcttggggcatctgagcaagatatcatagagttcttttcctttactggagatattgaatatgtcgaaatgctaatagaggatgagcgacttaaaatggcggatgtgacctgcaagaactaacaacgtgtctttacgtggcaccagtagttatggcgcatactcggttcgcggccttatggcggctcctgtagattgagatccagacgtacgatactacactatgacgctgctatcaccatcttcttttgagaatagatgtcagacgctggcgagtggtagccgaatcatgctgtccagcaagggccgaagtaccgtggtgaggcggcatggcttgggcgaagggcnntatatcctaggngnnatctgacgctctcaacaaagccaaaggcattttcgatgaaaagcanccagctatca

SEQ ID NO: 435 - DNA, 286 bp, Lilium asiatic
acgcttacgcatgacctccatcacctgaaaaattatctcaagcccctcatctaaactctcctgggaactttgtactcactgtacattcacatacttgtaattgcgaccatcttacaatcttacttattatgcatatcaaagctttatatcatattcccgtatgatatacatggaccttaaaatatatcatactacatcttccatataatcaacatcgctcatatatatacttcatctatattaattatctcttcgataacacatatccaatttccaaagatcccta

SEQ ID NO: 436 - DNA, 436 bp, Lilium asiatic
gaatttatcaaatgtccttgtaacaagggggaggagtgagacgagtgaaaaaaactgacatattgagtgatgtcaggttggcctgtcagctatatggatttttttatacatgatacatatctcaagatacactgcaacggtactacatactctaattagtattgaccctggtatgatatatttcctacgcatttaaaaaccctggtatgtgaacttcatcggtaggattgtaacttcaatttagttagtctctaattaatgtgttataatattagttgtagaattctgaacttgtttcattacctgcatgggatgctcatagttccctttctcgatagtgttagatcccttgcacttcttttataacaagcaacttaaatttttaaccgttttgaggcttatttggcataatacacttttgatttcatgttctatg

SEQ ID NO: 437 - DNA, 382 bp, Lilium asiatic
ggcgggatcgcgcgcggtcgtatcgcagaggagcagtcatcatggcgcaagaactataccgagggtgtcgtggcgaaggctgagacagtgtctgacggctgtgataattggatgatgcggctcggaacgatcccggacgggaatgggtctggtagttaatggtgttattttcatctgacattgatcatgcgtgaggactcctggagcacatatctgaagagcatgtttgcaatggtcattttacatccaatggtgtacgcttctgaaacagtgaggatcgtaaatcgtgaatgaggatcattatttgagaccggctataactgttaagcagatccttgcattattacaggactagctggaactatcaatatctactgactct

SEQ ID NO: 438 - DNA, 306 bp, Lilium asiatic
acggtcgggatcgcgcgcggtcggatcactgaggagcgcttatcatggagccagaaccatcccgggggtgaccagtcgaagtcgtagacagttgctgacggctgtgatgaatggcagaaggggcactgaactattaatggaaagaatccgtctggctggaactgatgttatatacatctgacactgatcatgaacgaggcctttcatgagctaactggactagtgcaagaattgaataggctatgttcacccaatgctgtaccctatttgtacagtgcgtatcgaaatcgttaatgaggacactgg

SEQ ID NO: 439 - DNA, 331 bp, Lilium asiatic
acgctgggccacgacttccagctactgatcctctatctcatgcccctagtctcaattctaagaggaacgttgtaatcactggacattctcacacatgtctttgcgagccacattaattctactcatcaaagactatccaagctctatacaaaatgcctctatgatagacctgaacattaaacaaacccatccaattctccagataatccacattgttcacttggaacttcatctactgaaccacattattatcaccgaacatcttatggataagattcataatatatatactcatgttattgccaatactaatcacatctttaaaaatatc

SEQ ID NO: 440 - DNA, 442 bp, Lilium asiatic
gtgggctagggcagccatttaccgctcttctaggagatgcccctagtgtcgatgttaagaagaacgttattctgactataagttctgacaaaggtctttgtgggggcattaattctacttctgtaaagatgagcagagctctttacagattgacttctgctggtcctgaacatgaaacaaagtatgtcattttgggagagaaggggaaggttcagttggtgcgtgattcaaggaaaaacattcttatgaccgcttctgagctgcagaagattcctgtaaactatactcaggttgctgttcttgctgatgacatcttgaagaatgtcgagtttgatgctctgagggttgtttttaacaaatttcaatctgttgtctcatttcttccaacagtagcaaccatattatctcctgaggctgtggaaaaagaaatcgaatcgggtgg

SEQ ID NO: 441 - DNA, 453 bp, Lilium asiatic
ctgggtatccacttccagcacctcaagcacagcctccagctcaaggtcagaaatctcctgggggtcaagtagcctatggccaagcacagccatctgctaccgcccagcctggctatgttcagcccgcgcctgtgcaacctggatatgagatgccccaaggacagactggatattatcaagacccttcgaatgctgccgctgctccaccttctggctatggaactgcagctcctcagccaagttatgggcaacaaccatcttatggttccgccccaccacctagtcagccaggttatggccaacaacagccgtagttttgttggtatggtaagcaaagcttcaaactcagtttatatcttctggtaagtcatttgagattgatgtcaatggaactgggtttttccagtttttattctattcgaaggttacttttggagctttgttattacttgg

SEQ ID NO: 442 - DNA, 304 bp, Lilium asiatic
ttgagccatcatttaccactactttagctatagccctctaatacgactatacaggatgggtatcctgactgttggggctgacaaatgtcattatgatggctttaatagcacttctgttaataagagcacaactctttacagactgacttatgcttatcctaaacatgaaacaaagtctgtcactttatgcgtgaaagaccaagtctagatcattcctgattcaatgaaaatcattcttatgacctctttttagctgatctagattcctgtgaactattctcaagttactacacttacttatgac

SEQ ID NO: 443 - DNA, 255 bp, Lilium asiatic
attacccatccgcacctccaactcatgctttagctcaatgtcccaaacctacctgagcgcgagcaaactatgggcaagcacagccatcttcattcagccagctctcctatcttaaaaacgctcctgttcaacctctatatcatataccccaaggacatactcgatattatcaagacccttctaaagctgaccctgatccaccttatgactatggaacttcatatcatcaaacaagttattagcaccaaccatctt

SEQ ID NO: 444 - DNA, 447 bp, Lilium asiatic
gagaagcttgctaccgaagaactatgtaagcactacacgaaggattttggaattgaatgccgcattgggcgttgtcataatatctatggtccttttggaacatggaaaggtggaagggagaaggctcctgctgctttctgtagaaaggctctaacttccgttgataagtttgaaatgtggggagatggactccaaaccagatccttcacattcattgatgaatgcgtagaaggtgtcctgagattgacaaaatcagacttctgggagccagttaacataggaagtgacgaaatggtgagcatgaatgaaatggccgaaatggtactcaacttcgaggataagaagcttcccattgagcatattcctggccctgagggtgttcgtggtcgcaattctgacaacaccctgataaaggaaaaacttggttgggcccacacaatgagactt

SEQ ID NO: 445 - DNA, 344 bp, Lilium asiatic
acgcttacattgcgactcaagaaactggagagggtggatttaataaaccgtgcaaataagctggggctggaaagaagacttggattgcaacatgtgtttgtcaagtctatagctgattcaatatgatacgcttaaaagactgctattcaaaagccgaatctataagagtgaggatgacactggaagggacatctattactggtgatcctaatgatgcagtaccatgtactatagctggacctttatcttcacattatagacatttatcatcgaaactactttttatgttaatataacattcgtgataatccaatgcaagtattcattttacaattacattactt

SEQ ID NO: 446 - DNA, 380 bp, Lilium asiatic
cacagacaccagctctagttccagaccactctccagactaccctcacgtcacctccaagagggagagtgaactcgagcgacattcatcaccatgtcaatttggctagcctcatatattcatgcattatcctaatcctatactgtaccgtattgagaactcttactcaggacttcaatatcactcccatacttctctctaccaaatctattgcccataatcctgcagcaccttatgagcatcctactctaatgtccaatataacattccagcccatgtcaaatcatctatcttatgctgcaccctatcaacaccaatgactgaagctagtctcaccatacagcaaaatcgaactatctcactgactaagcatctttaccac

SEQ ID NO: 447 - DNA, 431 bp, Lilium asiatic
gtcgagccggtagagccaaaaaccttatcagcacagccgtccaatacttctgtctcaagtgagggtgatgagccgaaggctcagcaaggtcctaacagatgcaatgcttgtcagaagcgggttggattgatggggttcgggtgtaagtgtggaagtatattctgtgcggcacatcgttactccgacaagcatgactgcccatttgattaccggactgcagccaggagtgctattgccaaagcaaacgcattggtgaaggctgacaagctggatatgatctacaacgttaatgaagtgctcgttgatacctctgctttctgcaactatgccctttgattccatgttggctgattgtcttttaatctggactattaatggtggaggcctgggtgcttatggcacctatgcagccttgagaacatttgcttgtt

SEQ ID NO: 448 - DNA, 433 bp, Lilium asiatic
ggcggaatcgcgcgcggtcgtctcgctgaggagcgcatatcatggcgcaagaaccatcccggtggtttcgtcgcgaaggcggagacgctgtctgatggctctgttaatttgatgttgtggcactgcactattccgggaaagaatgggactgattgggaaggtggttatttccctctgacactgagcttcagcgaggactacccgagcaaacccccgaagtgcaagttcccaccgggcttcttccacccaaatgtgtacccttctggaacagtgtgtctgtcaatcctcaatgaggacagcggttggagaccggctataactgtgaagcagatccttgtgggaatacaggacttgctggaccaacccaatcctgctgaccctgcacagactgatggttatcatctatttatccaggaaccaacggagtacaaga

SEQ ID NO: 449 - DNA, 258 bp, Lilium asiatic
gttgagcctgctcgtcgtcgatccaaagagtttcacctgtcaacaaaccgagactctaaaggtgcttactggctgaacaggtctaaaactgatgtctatggctaacctggcccacaagagcacgacactgactattagcagtgttaaacagtcgtgagcagatcatatttaaatgcgatcggtgtcaactgctaaaccttgaggaatgtgctggacatgcgaacagtctatagaggttttgctgatgcattggtagac

SEQ ID NO: 450 - DNA, 299 bp, Lilium asiatic
acgcatacacacgagctttagaaaatgacaacttatctcattaagctcacagagacactactgggaagaggtgtcatctatctacatgcatgaccttgctcattagatcatcttacaatattcacttatgatcgtattaacatcctataccatgttgcgaacctatacaaacaacattagatattatgaccctacatctacatataagtacatcgataacatagatcctgcaacttgttagcttccgctctatactcaatataaggatatattacatgataaaaatactgacatatgta

SEQ ID NO: 451 - DNA, 413 bp, Lilium asiatic
aattaatacgagctttagaaaaagacaacagggcagaggaagctcacagagtttgggtaaagaagattggtcacgatgtacattcagttccttggcgggtttgtgatcttatgatatccatttattaccgcaataatatgcttgagcggcttgtgaagcttttcaagggactcgaatcctatgaccgagtacctccatcgaagtctatcgttcaaaaagtggcagatgcgtatgagatgctgggctctctagaagaaaaaaatagaataatggagaaatatagtgatttatttagcaagtcatcagagcgtttgaagaaatctaggaaggcctcacagaagaatggaaagataacagggacaaagaaggataaaaacctagaagctctagatgagggccctgcagtctctggt

SEQ ID NO: 452 - DNA, 354 bp, Lilium asiatic
atacgattcccaatccggactccctaattctaatcatctacgcttgcccgtacgctgcaggccgggggcatatccaacggcggcgttgcccctcgcatgcagctcgctaccaaagctgctctcacgtcggtcctgaccaccgatgcattgaataacccccatcactacatgccctgcaacactgctcttccagagatccctaaataccacaaaagcacgtatcttatcatcaggtagctaccgctccacaacctaattagggagatcgcgcatgattataagacagatctccgtcttacaaccatgccgagctaactttccaagatgcgtattaagcttatctcgtagcattgt

SEQ ID NO: 453 - DNA, 314 bp, Lilium asiatic
gacctacgcattcattcgagctttagaaaaagacaacttttctttggaagctcacacagttcgaatcaagcaaggtttctaacgatcgggattcaattcctttgccaagtttgttatcttatgatatccatttattaccgcaataatatgctttaacgtcttgtgaaacttttcaaacgactctaatcctatgacctaatacctacatcgaagtctatcgttcaaaaagttgcttatacctatgagatactctgctctatacaagagaaaaatataatacttgagaaaaatactgatctatttatccagtcatc

SEQ ID NO: 454 - DNA, 449 bp, Lilium asiatic
attcccaatccggaaaccctaattctgatcagctccgatggcccgtacgaagcagaccgcgcgcaagtccaccggcggcaaggcccctcgcaagcagctcgctaccaaggctgctcgcaagtcggccccgacgaccggcggagtgaaaaagccccatcgctacaggcccggcacggtggcgctccgtgagatccggaagtaccagaagagcacggagcttctcatcaggaagctgccgttccagaggctggtgagggagatcgcgcaggattttaagacggatctccgtttccagagccatgccgtgctagctctccaggaggcggcggaggcttatctggtgggattgttcgaggatacaaacctgtgcgctattcatgccaagcgcgtcacaatcatgccgaaggatatccagctcgcgcggcggatccgtggcgagcgtgcctaaa

SEQ ID NO: 455 - DNA, 444 bp, Lilium asiatic
gaaataaaaaaaagagagagatctggttgatcaaaccctaaccctagcaagaagggaccaccggcgatcgccatggacgttatcaagacccagcagctctccgcgcggccgattgagaaggccgttgtccacccgctggtcctcctctccatcgttgataactataatcgcgtcgcccgcgacacccgcaagcgcgtcatcggcgtcctcctgggctcctccttcaagggcaccgtcgacgtcaccaacagctacgcagtgccatttgaagaagatgagaaagacccaagcatttggtttttggatcataattaccatgaggcaatgtttggcatgttcaaaagaattaatgccaaggaacatgttgtcagttggtatagcactggtcccaaactacgagagaatgatttggatattcatgccttgttctgcggatatgtgcct

SEQ ID NO: 456 - DNA, 446 bp, Lilium asiatic
gatacattgagatactactactttgatagtgatgatttagtcaagcaagctgttggcggtgagtctccggaaggcccgtttcaagaaagggatgaagagggtttcagaaattctgagactgaagtgctaaagcagttatcatccatgggccgtctggttgtttgtgctggggacggtgctgtccagagcttaactaatttggccttattgcggtatggaatctccgtgtgggtagatgtgccgatagactttttagcaaatgagatcctaaagaatgatttagcgtcacctactacgctagtgccaccagatacggagtcttcgtcagaggtgctgcaggagcttgctgagcgatataataaaatgaaaggaggatatggaacagctgatgcaacagtctcactccaaaaactagcaattcaactggggtatgaaagcttagactc

SEQ ID NO: 457 - DNA, 367 bp, Lilium asiatic
ctttgattgcaactcaggagactggtggtggtggattaaagaagccgaagaaaaaggctggtgctggaaagaggactttgattgcaacatgtgtttgtcaagcctgtggcggattcaataagtcggaggaaaagactgctgttggaaagcggaaacgataggagagaggatgggactggaaggaacatctatgagtggtgatcttaatgatgttgtaccatgttataaaagctgtgttcattatctgcatattatctgcatttttcattgtaactactttctttgtaaatataacattggttataatccgatgcaatttttcattttacaataaaattacttgttttcaaaagaactgatgtgaatc

SEQ ID NO: 458 - DNA, 439 bp, Lilium asiatic
cccagaagaccgtcgtcctcccggcgcaccgccgcggctgccatctcgtcacctccaagagtgagagggaaatcaagcaggaggtatcgggatttaaatgtggcttggctcatctatttctgcagcatacaagtgcttcattgaccattaatgagaactatgactcagatgttcagtatgacacggagaccttcctcaaccgcattgttcccgaggggccttcagcgccttggaagcatacactagaaggtcccgatgacatgccggcccatatcaaatcatctatgtttggctgtaccctgacgattccaatttctgatggtcgtctcaatatggggcaatggcagggtatctggctgtgtgagcatcgggaccaggctacacctcgcaaaattgtggttactcttaatggtgtatgaactgcaaagggactgagaca

SEQ ID NO: 459 - DNA, 423 bp, Lilium asiatic
gttaggacagcctctcttccctggcgagagtggagttgaccaacttgttgaaataatcaagatactaggcactcccacgagagaagaaatcaaatgcatgaatccaaattacacagagttcaagtttccacagattaaagctcatccctggcacaagatcttccataagagaatgccacctgaggctgtggatctggtctctagacttctccagtactcccctaatctgcgaagtactgctttggaggcattgattcatccattctttgacgagctccgtgacccgaatgcccgtctaccgaatggacggttccttcccccactgtttaacttcaagcctcacgagttgaaaggagtacaaatggagatcatatttaagttgattccagaacatgcgaagaagcaatgtgccttcctaagact

SEQ ID NO: 460 - DNA, 445 bp, Lilium asiatic
gtagatcctgctgctcgtgggtccaagtggccagaactgtggccaaagcgagtggcgaaaactccttactggctgaacagctcccaaactggggtctatgggaaacctgccccacaagattttgaagcggactatgagcattggaaaaaaatcgtaagcaaatcatatctgaaggggatgggtatcaactggaaaactgtgaggaatgtgatggacatgcgagcagtctatggaggttttgctgctgcattgcgagacatgaaggtttgggtcatgaacgttgtctcaattgattctcctgatacactgcccgtcatctatgaacgaggattgttcggaatgtaccatgattggtgtgaatcttttagtacctaccctagaacttatgatcttcttcacgcggaccacctcttttccaaactgaagaagaggtgcaagttagtcg

SEQ ID NO: 461 - DNA, 270 bp, Lilium asiatic
acgcttgaacctgctcttcgtcgacccagagcgtccagcctttcaacgtgctccggatccgagggtggtggacggacggacgccactgacattgatgcctgctgctactcatgccgacaataggactaccctgactattaccactcatacgaaatcatcagcaaacattactgagttcccacagacgtcaactactgtaacgtaaagaatgtgctggaccagctagcagtctaagtcaatattgcttctacatcgttctacatcaacaca

SEQ ID NO: 462 - DNA, 370 bp, Lilium asiatic
cccagacgcccgctgtacatcctgaacacctctccgactatcatctcgtcacctccaagaggcagagggaaatcacgcgacagtgcatcaccctctcaatgttgctagcctcatctatttatgcaatatacaattcctacactaacccttaatgagaactatgactcatatcttcaatattactccgatacctttctcaaccacattgttgcagaagcgcctccacccccttatcagcctacactctatagtccctataacatgccagcccatatcaaatcatctatcataggctgtaccctgacactcccaatgccttatggtcgtcttaatatgctgcactatcataccatatcactgactaagcatc

SEQ ID NO: 463 - DNA, 431 bp, Lilium asiatic
ttcagtggcaaggaggtgatcgtgattgccactcggaggatagtgaggccgccaaagaaaggctctgctgttgtgcgtgctcgcagccgcacactcaccgctgttcatgaagctatattggaggatgttgtgtacccagctgaaattgttgggaagcgtgttaggtatcgattggatggttctaagatcatgaagatctttctggacccaaaggagcgcatcatcactgagaacaagctggacacattttctggtgtctaccgcaagctctgtgggaaggatgtggtgtttgagtaccctttggacgcataatgcaatatgtgtcaggtcatagttttggctatgatttctcatttgaggatagctgtttatctaggcagtttttattctgaaaccagattatggtgtcatgtttaattatatgcattcgt

SEQ ID NO: 464 - DNA, 426 bp, Lilium asiatic
ctgacacgtgaggtcgagctccttaaagcttatttcttcatacttctcacaacactgaggcgctgggtataataacgggggggcttgataatactttactacatctatatgcactagttacttattctcgtgtacacctccaatgctatgtttcaataaatgatgatttggattgaaatactcccactacatctccatttcaacagtttaaaactctctatcatacataatcataatactttacacaaaactgaattcaagaccctaaacacatgttaccatatctatcataagtctatcatttacactcacgaacacttcatacttgagtactagtatgactacctgaacactaagagatatatgtcatctactaagcttacacttcatatgatgttatatatgaatacttatcagctttttata

SEQ ID NO: 465 - DNA, 442 bp, Lilium asiatic
tgggaatcagaaatagaagaacttggttcagttagagaattacaggtcaaagagggggaggcctcgtaaaaatgcgcgggacttgacaaaaaaattcactactcaaatattgaagagaaaagtattcaggagaaactctcaaagttaacggacgaaaagaaaattgtgaaagaagagattgcccgtctcaagcccgatctccaaaagttgaaaagtctcattgccaaaagaaccgaacatattcgaaagatcgagaaaaggatacatgaggttgttgaccgaatttatgaagatttcagtaagtcggttggagtaaacaacatccgtgagtaccaagaaaactatctcaaggctgcgcaagaaatggctgagagaaagcagacactgaacagtcagatgtcaaagatcaaatatcagctggagtatgagcaaaaacgataca

SEQ ID NO: 466 - DNA, 443 bp, Lilium asiatic
ggggttgttgggaggtttgggagtagtagcagcaacctgtttgctgcttcgacatgggctgccaatcttcagggaccggagattccggtcgtcagtgctcctaatcccgcatcttcagctgcggaacaggcgtctgcgtcaagtactatggctgttatacagggagatgccactgctactgatgcatccgtggagccgaacagtgcagggtcatcgaggatctacagaagaagaggcagaagcagcggctctggttctttggatgttgatggtgttcagcatggagatgctgctgccactggtggacccgtggaatcaagtagtgcagggtcatctacgatctataggagaagaggaaggagcagcgcctcgagttctttggatgtagatggaggatctatgcatgggcgtaaaagaagaatgctaaactagatatccgtgag

SEQ ID NO: 467 - DNA, 147 bp, Lilium asiatic
cgtaactatgggcctatgtagttgagttatctgtgtttacttgtgtttgtgttcgatctatttcctgaacttatctatgtatgagtcagttaagtcaccgtgtacggtctgcctaacccgccccaccctcgcggctttggggataat

SEQ ID NO: 468 - DNA, 446 bp, Lilium asiatic
cggacgcgtggggtggggatattcggttggagcagtaccgaaaagaatggtgaagaacgtgggtctctccctaagcaatgctcccaataatgagcaagatgacccgtacaaaaagggttttgttcgacaagctcacgacgcttccgcaggaggagaggcattgggcacaactggtccgacccttgccacgagacagatgccaaaggtaccgtcagttggaggcgcttccgcaggaggaaaggcattgggcacaattggtccggcccttgccacaggagacggacgccgagaggtatcgcctgttggagtcattcttcagcatgcatgccttgttcaaatacttcagcctcgatgagctgagtgtggttcatccggtcatccccgtccgtcgatccaatgcaccaaaggaagggcggtagaaggaaagtcattcggagaaaggggga

SEQ ID NO: 469 - DNA, 442 bp, Lilium asiatic
acgcccacgcgtccgcccacgcgtccgaagaaacagtgcaaaaagaagctgaaatgaaagccaatgagcgagagaaacctgcggaggtgtcaccacatgatgacaccgagggagctcacgacaaatcagaatcagctcacgaagttattgtggatgcttcagaagaaaatcatgatactgctttcgatgctgaaattgatcacaaccttgaaagtaaggcatcttctgattctgcagggggagagtatgaggaggaagaccatgatgagagtttacttgaacccgattctcatgaggatactactagcgcagagacatcttcaaagcatactttgtaacaggaacatggatctcatgagactgaatgattatcaaaagcagagttgggtcgtcttgaagcttgtcactggacaggggagaatgctgcgccgagcacaaatga

SEQ ID NO: 470 - DNA, 442 bp, Lilium asiatic
cttccctcgcccaacagccggtcctctccgtccagttgttcaatgccagactctcaagtacaacatgaaatctaggtctggaagggggttttccctggaggaacttaaggctgcaggcattcctagaaagcttgctccaaccattgggatatcagttgatcaccgtcgtaagaaccgatcactcgagggcctccaatcgaacattcagaggttgaagacttacaaagccaagcttgttgtcttcccaaggcgatcacagaagtcaaaggctggggattctacacctgaggagctggccagtgccactcagctccagggcacttacatgcccattgtccgtgagcaaccgtctgttgaagtggtgaaggtgactgaagagatgaaggcattcaaggcctatggcaagctaagggttgagaggatgaaccagaaacagattggg

SEQ ID NO: 471 - DNA, 423 bp, Lilium asiatic
cttcgccgtcggaaacgtcgagcgagagctcctcgccaaacaggttgcacttgatcttactgaagacgaaagacatcagtttcagaaaattatccatgctgacattaacactgtgttctgccctattgttggttgtggcgctcagttgaattgtttggaagactttgaggatcactatcatgctcgacacactgcatcttgttctacatgctttagagtctacccaacatctcgattactgagtatacatgtttctgaagcgcatgattctttctttcaggcgaaagttgcacgtggttttccaatgtatgaatgcctggtagaaggctgtggagtgaagttcaagagctacaaagggcgaaagcaacacctaatcgataaacatagattccccaagtccttcgagttcttcaagaagtctcg

SEQ ID NO: 472 - DNA, 442 bp, Lilium asiatic
cttgaacaggatctgcagatcccctccggattcaaccatgcaatctactccagatccgatatcgatagagtttcgggtgccactcccattaattactgaagctactcgtgccgatactagagataccttgtctcccgcaagaaatacgtggtttccattgacgatgactgacttcccgcaaacgacatctacagtaacctatttgatgctttggcgcaacacgttttcaacctccatgttgcctgcacaccgttcttcttcaacacactgtatgatccattccgtaaggtcgcagactttgtccgagggtatccgatcaggctgcggagtggcgtctcatgtatgatgtcatgtgggctctcgctcaacggtggtgattacgatgcaccgacccaaatcgtaaaaccgcatgagcggaactccaaatacgtggatgctgtga

SEQ ID NO: 473 - DNA, 413 bp, Lilium asiatic
cccagacgtccggccgcgcgcccgaacacctaccggactatcatgctgacatctacgagggtgacagggaaatgcctgcggaggtatcagcacattaaacacactctagtctcatctctatcactgcaacagtacaactagacttaattaaccagtaatcttgactattacttagagatactgctttacacgcataccttgatcatacccatagttgcaaaggatcctctaacgccttagaagcatacactcatcagtacggccatcatgccagctcacatgaaaccatgtctcattagcagactcctggcgatgagacttcttgatagcatactcaatatcaggcacatgcatctcatgtgactgaatgagcatcgatagcagactacagcattcacaaatgttatcactgt

SEQ ID NO: 474 - DNA, 438 bp, Lilium asiatic
acgttcagtcgcacggaggtgatcgtgattgcctctcggaggatactgaggccaccaaagaaagtctctgctaaaatgcgtgctagcagccgcacactcaccgctgttcatgaagctatattggaggatgttgtgtacccatctgaaattgttgggaagcgtgttaagtatcgattggatggttctaacatcatgaagatctttctggacccaaaggagcgcatcaacactgagaacaagctagacacattttctggtgtctaccgcaagctctgtgggaaggatgtcgtgtttgagtaccctttgtacgcataatgcaatatgtgtcacgtcatagctttagctatgatttctcatttgaggatagctgtttatctaagcagtttttattctgaaaccagattattgtgccatgtctaattatatgcattcgtaatt

SEQ ID NO: 475 - DNA, 453 bp, Lilium asiatic
ctggatcattcagtagcaaaaaatcaacccgcccgcccgaaactgcagtgattagtgagcgagacgctgaaagttcccgtgagaagcaattgctcaaagctcaagagcaaagatacaaagcccgaaggttctcatctttcactagttggattcctgatttgcagagggtgtgggcgctcaagctgccaagggcagagagatcgagcggtgaatcatatcctaagaagtcgaggaagaggaagcggcgcattactgccaatgacatggtgtgtgaaactccgatgaccggaaagagagtttcgcctatcggacgtggcgatggcttctccgaaagtggtcagagcttgtgcagatctctctccaaggttttgtttgccgatgaatgatggtacatgtgttctcgatgttgtgaaacaaatccagagatgtcgaagatataagtaggcaaattcg

SEQ ID NO: 476 - DNA, 445 bp, Lilium asiatic
catgctcatgctcgtccgcctcttggaaggctgcactgaggaatatgcagatttggacatgggatctgttcacgtcaaagacgttgcgttggcacatatcatgctctacgaaaacccctcagcatccggaaggcatctatgtgttgaatccatcgctcattacagcgactttgcttcaaaggtggcagaacgttaccccgagtataaaatccctagattcccgaaggatactcaacctgggttgctgagggcccagaatgcgtcgaagaaattgattgatatgggtatgcagttcagctccatggagcaaatcatcaaggatgccgtggaaagcttaaagagcaagggttacatctcttgaaatactttgtgtagttgtgcattcagctataagacctattcacaaaactgctgcataaaatccagattttggggataaatcttg

SEQ ID NO: 477 - DNA, 427 bp, Lilium asiatic
aattcccatttcgacccacacgtacgcctacgcgtccttccacgcgtccgaacaaactttgcatcaaagatgctgacatctacgccatgcatcgtgataaacctggggaggtatcaccacattattacacctatgtatctcacaacaaatcataatcaactcactaagttattcagtattcttaacaataaaatcattattctgctttccacgcttacattgatcacaacctttaaagtaaggcatcttctgattcttcagaggcatactataaagaggaacactatgatgagagttcacttgaacccaattctcattaagatactacaaactcatagacatcttcaaagcatactctgtaacatgaacatgcttctcatgagactgaatgattatcataagcagacttctctcgacttatatctta

SEQ ID NO: 478 - DNA, 387 bp, Lilium asiatic
gcagatcgcgacgtgcgggtgttccgatcaggagatccaatggaccacaacgaggcgggatgccatgctcctgaagcaccgatcttctgtgtcaacaactgcggtttctttggcagtgctgccacaatgaacatgtgctccaagtgtcacaaggatcatgtcatgaagcatgaacaagagaaacttgctgcatcctctttcaatagcatcgtcaatggcagcagcagtagcagtgcaaaagagcctgtccttcccagtaaagctggtgttgaagtcgagccggtagagccaaaaaccttatcagcacagacgtgcaatacttctgtctcaagtgagggtgctgagcctaaggctcagcatggcccgaacagatgcaatgcttgtcat

SEQ ID NO: 479 - DNA, 249 bp, Lilium asiatic
cttacttgtgacaagacgatattcagttctttcagtttaataacagaatgccaatgaacgagggactgtacctaaatcatggagcataaattagcataacgtcccttacattggcggtactgtccaaatcgcactcttcacctactaagaaaaacattaatttatgtcgcatgatctagactatctaagttcacacaatcttgatctccatgctgtagacatcagctaccatcattgaaaacttattat

SEQ ID NO: 480 - DNA, 437 bp, Lilium asiatic
cccacgcgtccgtccacgcgtccgaacaaacagtgcacatggaagctgacatgaacgccagtgagcgagagaaacctggagaggtgtcaccacatgatgacacctagggatctcacgacaaatcagaatcagctcactaagttattgtggatgcttcacaataaaatcatgatactgctttacatgctgaaattgatcacaaccttgaaagtaaagcatcttctgattctgcagggggagagtctgacgaggaagaccatgatgagagtttacttgaacccaattctcatgaggatactacaagcgcagagacatcttcaaagcatactttgtaacaggaacatgcttctcatgagactgaatgattatcaaaagcagacttgactcgtcatgtatcttctcactggacaggggagaatgctgcgccgagcactgat

SEQ ID NO: 481 - DNA, 440 bp, Lilium asiatic
cggacgcgtgggcggacgcgtgcgcggacgcgtgggcactgccaaaaaccccatcttcagccgtcatgatccgccttctcaggagcagtttgaccttgtcgcgagcagctgttgttgcatttttcaacagtcttggcgaatgcggctttcatgcttcattgttgttctacctaagagctcaattccatttcaacaaagaccagtttgctgatctgtgactgattgatggaattgcaggggtcttttcccagttgcttttgatgcccttgctcgagccaactatgggagaggagcaattacttaccataggactcttaccaagctgcgtacatgtggttctttacagtgattgcttggacctctagggttccatattttgcatcatgatttgtagtccttaatgttctcattcaagcatgtctaagaagcattgtatccag

SEQ ID NO: 482 - DNA, 376 bp, Lilium asiatic
ctgacgcgtgggcggacgcgtgggggcgaatgcgctccagctccaattggaggttgtggacgtgaagatcgggctggaagtcgatgctctcaagaatggactgcatcgggttgaggagagagacgcaatgcttggtacagagatcaagcaattgtgggataggacggatcagctgagcagaacaatctatgaattgaaggatggcagggttctgtcgaatgcctagtatgagtctatgttggatgagctgaagagctgtggtgacggagatttggattaggatcgggttagggcaattgcgaacgagattgttgatgaagagattgggaagcatgctgcagatggtctcgggagggtcgactatgctttggcgttt

SEQ ID NO: 483 - DNA, 449 bp, Lilium asiatic
gcaaacctttacatgtaaaccttcgttccatggtcgacttgacatagagcagacaattctagaggtgcaaaattatgagatatgcgtggagtacattgaggaattgatccacaaacaagaaccaattatcaatgtactgcgacttttggtattattttcccttactaatgctggattacccaagaagagctttgattatttaaggagggaagttctgcatagctacggatttgagcacatgccaaccttgaataacatggaaaaagctggcctctttaagaaacatgagtcaaaaagtaactggctaactataatgagatctcttcaactcattgctgaggacactgatactgccaacccgaatgacatctcgtacatcttttctgggtatgcacctcttagcattcgtctggtgcaacatgcaattaaatctggatggcgttcgatag

SEQ ID NO: 484 - DNA, 446 bp, Lilium asiatic
cggcggtgaagaagcccaaggctgggaagaagctcccggcctccaaggaaggggagaagaggaagaagaggtcgaagaagtcggtggagagctacaagatatacatcttcaaggtattgaagcaggtccaccccgacattggaatctccagcaaggccatggggataatgaacagcttcatcaacgatctcttcgagaagatggctcaggagtctgctcgtctcgcccgctacaacaagaagaataccatcacctgccgggagattcagacctctgtccgcctggtcctccctggtgagctcgccaagcatgccgtctctgagggtacaaaggccgtcaccaagttcactagcgcctagtgtgtgtcttttagagttaccaaatgttcctggatttgtagtttgtggtagctatgctttgatgtcaatgtcaacaggatatttgct

SEQ ID NO: 485 - DNA, 333 bp, Lilium asiatic
cggactcttggcaccgctaccttaataagaaccactatgcatagcattaaagctggggaggtactaattaccttgtggacacgcttgagtacttcactactcatgtactgaaactttcaagcaatcattccaaagactactagaaatcatctaccataccaagacacgtgtcccttgcatgctagatcaaccaaaatatatgcaagctgatagctgtagtcaccatctctcatgtcggaatcatacccatatgaactctgaactgctacatgagaagactctagacagaggttattctgcttactcgaatcctcccaagaagactctgaagtc

SEQ ID NO: 486 - DNA, 246 bp, Lilium asiatic
cttacgcgcgagaagacgatggccagagctgtcaatttaacagagaacgctcattctcgatgggcgggtcctacagcagcttcatacattgatccagactgacattattactgcggtcctgcctaaaaatacctgtgctgctaatattaaatggatggaataatttattacgatctcaactatttcgagagacactacctacttatatacgttgtagacgctatcaaacgtctcatataatgattt

SEQ ID NO: 487 - DNA, 359 bp, Lilium asiatic
gcggaaagggggctcactccctatgatataggaagcatcttgtgccgagttactctcgggaagtgtatcggggatcgaggagattatctatgaggcgaaagagtctgtcctcccaggtaccagtgaatctgcattccttgaggccgtctctgaaatcatggatcgtcatctcgatgaactttcccagtaggaattagatgtgatggttatatgattatagctatgtgaagcacaaactttcagttcagatgtatctataacaattctttcatggataagctttgtagactgtaatgtaagtatgtttgctggtatcagtcaagtactatgagcttggaatatagtctgcttatgttgtg

SEQ ID NO: 488 - DNA, 330 bp, Lilium asiatic
aaccttcgatcatggacttgatgttaagactagtgcatctgggaattacaggttgaatccaaaaggtgttggttagaccatggtgtctggaggaggtgctagtgtcatttatgcatattcagtcggggatctggtctatgcttctgaactgggtaattatgcacaatacagtggagcaccgaaagaatgtgaagtgttgcagtatgcaagagttcttattgattgtgcaactgctaatcctgatggccgcatacgttcccttctagttggcttaaggattgccaactttactgatgttgctgcaacttttagtggcattattctaacttt

SEQ ID NO: 489 - DNA, 428 bp, Lilium asiatic
cagaaaccttcgtccatggacttgatgagaagactagtgcatctttgaaattcacaggtttgaatccagaaggtggtatttggaccatggtggctggaggaggtgctagtgtcatttatgcagatacagtcggggatctgggctatgcttctgaactggggaattatgcagaatacagtggagcaccgaaagaaggtgaagtgttgcagtatgcaagagttcttattgattgtgcaactgcaaatcctgatggccgcaaacgtgcccttctagttggcggagggattgccaactttactgatgttgctgcaacttttagtggcatcatccgagctttgagagagaaggaatcaaaactgaaagctgcaaggatgcatgtgtttgtgaggagaggaggtccaaactacaaaactggtctagagaaaatg

SEQ ID NO: 490 - DNA, 417 bp, Lilium asiatic
ggcaatacgtgtgaatccatggaacatagatgcagtggctgaagcgatggagactgctttggtgatgcgagagcaagaaaaacagctacgacacgagaagcattaccgatacgtcagtacgcatgatgttgcatattgggcgaatagctttctgcaagatttgcaaaggacttgtcgcgaccatgtgagaaggaggtgctggggcattggatttggactaggtttcagggttattgccctcgacccgaatttcaggaagctctccgtcgaccatatcgtgtcagcttacaagagaaccaagaggcgtgctattctattggattatgatggtactgtgattccacaaacatccatcagcaagaccccgaattctcaggcaattgccattctgaatagcttgtgcagagacccaaacaa

SEQ ID NO: 491 - DNA, 372 bp, Lilium asiatic
  modified_base (7)..(7): a, c, g, t, unknown, or other
  modified_base (13)..(13): a, c, g, t, unknown, or other
  modified_base (25)..(25): a, c, g, t, unknown, or other
  modified_base (32)..(33): a, c, g, t, unknown, or other
  modified_base (40)..(41): a, c, g, t, unknown, or other
  modified_base (51)..(52): a, c, g, t, unknown, or other
  modified_base (57)..(57): a, c, g, t, unknown, or other
  modified_base (80)..(80): a, c, g, t, unknown, or other
  modified_base (82)..(82): a, c, g, t, unknown, or other
  modified_base (85)..(85): a, c, g, t, unknown, or other
  modified_base (87)..(87): a, c, g, t, unknown, or other
  modified_base (92)..(92): a, c, g, t, unknown, or other
  modified_base (109)..(109): a, c, g, t, unknown, or other
  modified_base (118)..(118): a, c, g, t, unknown, or other
acaggangacgancgagaagcgagnaacaccnncgaggannccgaagccgnncaatngccattagaaaggacagaaaaancngangnagatncgagcctccaacggagncaaacattnggtcagaagttcatggggaacatgatggataacatttttcttagaaatcttacttctaaatctaagagtctctctgcagatgcccttgtaccatcgtcacctgtaaagatcccagagattgctgagtctgctcttgacaatgatgaagagaacccgctgttggaaacggttcgcggaaaatgcattactcaattactacttctaggtgttcttaacagtatccagaagaaatactggaacaagttgaagccccg

SEQ ID NO: 492 - DNA, 386 bp, Lilium asiatic
gccgtgtggagactggtattgtgaagcctggtatggtagtgacttttgggccaactggtctgaccactgaagttaagtctgttgagatgcaccatgaggctctccttgaagccctccctggtgacaatgtgggatttaatgtgaagaatgttgctgtcaaggatcttaagcgtgggtttgttgcctcgaactccaaggatgaccctgccaaggaggcggccaacttcacttcccaggttatcatcatgaaccaccctggccagatcggtaatggttatgctcctgtcctggattgccacaccttccacattgctgtcaagtttgctgagatcctgaccaagatcgacagacgctctggtaaggaaattgagaaggagcccaagttt

SEQ ID NO: 493 - DNA, 410 bp, Lilium asiatic
accacgcgtccgaccacacgtacgggatatactcccatacactgtggtctctctatccgggaccgggcaaaatcagggggaggaacatgacctaattcagatacgaccgatcaaataatcctaccatttcgacgacttccatgaagaagcatatgaaaaataccaagcggcaccattacaaaccgacggctctgatcaattggactccgactaacatccacagttatcgctctaaacccgaattttaggaacctcttcactcaccatatcatgtcagcttacaagagaacccataagcgtgcatattctaatggattatgaaggtactgagattccacatacatccatcagcaagaccccgaattctcaggcaattgccattctgaatagcttgtgcagagacccaaaca

SEQ ID NO: 494 - DNA, 377 bp, Lilium asiatic
ctggctggtccactccatggcttagcgaatcaggaagtgcttttatggatcaaatctggcgttaagaagtatggcgagaatattacttccgaacaggtgaaggagtatgttaaccagacattaagcaatggccaggttgttcctggatttgggcatggggttcttcggaaaacagatgccagatatacatgcctcagggaattttctttgaagaacttacctgatgatccactgttcaagctggtttcaaagttgtatgaagttgttccacccatgcttattgaattggggaaggtcaagaacccatggcccaatgttgatgctcacagcggagtcgtgctgaatcattttggtttaacagaagccaagtattttac

SEQ ID NO: 495 - DNA, 297 bp, Lilium asiatic
ctgcaatctcaactcagcagcaatgtctgggcgtggcaagggcggcaaggggctcgggaagggtggagggaagcgtcaccgcaaggtcctccgcgataacatccagggcatcaccaagccggccatccgccgcctcgcccgccgtggcggcgtcaagcgcatcagcggcctcatctatgaggagactcgcggggtgctgaagatattcttggagaacgtcatccgtgacgccgtcgcctacaccgagcacgcccggccgaagaacgtcaccggcattgaccgtcgctacccttttaa

SEQ ID NO: 496 - DNA, 432 bp, Lilium asiatic
ctgctttcaatctctcggcacctgaagcccgtgcccttctcgattccaaggagagatgatgacaagcaggcataatactcgccgcagcggcggttggagaatttagctgcatcgtcctggttctccgatacgatccgtctggaacgtcatgtagtctgtggctagattcatcaatgattctttctccttaattgctcctgacatcagttggtgtcagggtgcgggttaaacatgcctacaagatgaatgcaggttaatgaggtatgtaattgcaaaaatgtagcaatacttttccgacaagttgaatccctaacctaacatgttgtttctttggctgctatagatcaacaacaaaatagtaaacaagaaaatgcgtatctttttggagaagatgatgtgactcaaagtacaataaaattttttttatagacc

SEQ ID NO: 497 - DNA, 388 bp, Lilium asiatic
cggacgcgtggggaagccggagacccgcctggactccgccgtcttccagctcactccgacccgaaccaggggtgatttggtcatcacagccaatgggaaaacagagaagattgcatccgggttgcttaatccattccttgcccatctcaaagctgcccaggatcagatctccaagggagggtattcaatcaccctcgaaccaggtccgcgagccgaacatgcaccatggttcacaaagggcaccgtcgaaagatttgttcgattcgtgagcacgcccgaggttctcgaacgagtgagcacgatcgagtctgagatgttgcaaattggggaagcaattaccgttcatggtaatgagagtgtcatggctgaagatcaccatcaaacgata

SEQ ID NO: 498 - DNA, 322 bp, Lilium asiatic
cgcgcgtggggagagaaccaggacccgtgacaacaatctcctcggtaaatttgagcgttccggcatccctcctgctcctagaggtgtccctcagattactgtctgctttgatatcgatgccaatggtatcttgaatgtgtctgctgaggataaaactactgggcagaagaacaagatcaccatcaccaatgacaagggcaggctcagcaaggaggagatagagaagatggttcaagaggcggagaagtacaagtctgaagatgaagagcataagaagaaggttgaggccaagaatgctcttgagaactacttctacaacatg

SEQ ID NO: 499 - DNA, 397 bp, Lilium asiatic
cgcacccgagacttccgggagtgctcaggcatcaaatgttcctggtagccaaaatttggcaaatggcgggcagcagatgtttcctatgttctaccctgccaccgtaccaggatcagttcccgtgcaaaactccgaagtaaatgatcatggtgcaggtctctatgctgttcctttttctccattcatgggaacaatggctgggccttctccaagcacacttatacctcttagatacaacataccaacaagggctagtgccaccggggcagttggagaaaatcaggggcaagaagcaaggcaggcgcatggaccccagagacaagtagctgtgcggaggttccagttcgctattcagctcgacctgtctctcatccttaagcttgcagctgcaatcttc

SEQ ID NO: 500 - DNA, 331 bp, Lilium asiatic
atgcgtaacaatggtacaattgcatggcctctgggtacacaccttctatggactggtggacatcatttgggacattctcgttcagctcagctagtgattcccagtggtgcctgtcctgtgaatcaagagattgacatagccgttaatatggaatcacctttggtgcctgggtggtatacttcttactggaagttagcattaagttccggtcaaacattcggtgagctcatctgggttcagatacaggttggaaattgccaacaaaattttgcgtctgctcctggtttcccaggtgatccttgaaacagcggtaagaatgagtcagggatca

SEQ ID NO: 501 - DNA, 326 bp, Lilium asiatic
  modified_base (91)..(91): a, c, g, t, unknown, or other
  modified_base (97)..(97): a, c, g, t, unknown, or other
  modified_base (105)..(105): a, c, g, t, unknown, or other
aggcggaagcagcaacaccagcagcaggaggcaaacgacgaagacgacgacgagccagccggggcacccagagcacagagcgcacagcaanaaaagnaacactgncatactagcaaccaggggcagacggaaagaacggctagggaagcctaagatcttgtgaaacctgcgttgggattcgttctatttggccgatgaattatgactttttggcaaaaatgttacattgtgtcgcctatctatgttagcttttgatgtcgatcgatctgaacatgttttaaaaaacaagaccatgatatggtgccacatatgcccccatactacta

SEQ ID NO: 502 - DNA, 351 bp, Lilium asiatic
ctgtttatgactgacctggaactgaatccatgctcttgcttctctttgctggtgaccattctcttctcagagtctctacctgtctgtttcatgccatgctcctctaaaatgttgtcactgctgtcatcataatgactgctataaacagaattagtatcactactataatcacagctactgctgtgcccaactgagttaactgactttgtatgatcatgatatttaacagcacgcgcactgttcctgacattagaatcggacctctcatcatcagcaccacacaggaccttcttaatataaatgtcagacaactcattgactaatgctcctgatctaacgccattagattta

SEQ ID NO: 503 - DNA, 293 bp, Lilium asiatic
atcttttagcacataacataatttgcaattacctgaataagaatctttataagaagtttttcattcccaggggagtacatctttacttgtcacggatcatgtcaaacttacagaggttttctcggcaactgttcctcttgctttacactcactaatggagctgttctaatgatgtcctttggagcgtacagtgatggacaaaattatctctgtcgactattctaccacaccatgggatacagataatgctgatgttttacaaaatcaagttcattacacattacacacgctta

SEQ ID NO: 504 - DNA, 191 bp, Lilium asiatic
gctaccctttcaccctacccatatcacttcccttccaaaactccccattcaataatcatcttacacttctttattctcttcctttttctccattcaatccaacaatttcttctccttcttcaaacacacttatacctcttatatacaacattccaacaatatctaattccccctgctcaattttataaaat

SEQ ID NO: 505 - DNA, 430 bp, Lilium asiatic
gcaagatcgttgagcacggaacagaaagtgcaattagttgaagaagaatctggagaagaagttctccattccgaagggagtggatcttttcttggcacggaggatgtcaaacttacagaggttttctcggcaactgttcctcttgctttacactcactaatggagctgttcgaaggaggtcctttggagcgtagagtgatggagaaaagtggttttggcgactattctaccacaccatgggaagcagataatgctgatgttttgcaaaggcaagttagttacaaattaaacaagatgaagaaatctaatgtatgtgaagtgacgagcactcagcagaaatcttcactctctggtagaactgggtgggttattcaagaggtgatattgctccacaaggccttactaggcgatagcttcaatcttcagttca

SEQ ID NO: 506 - DNA, 352 bp, Lilium asiatic
agaattataggtaacacctttaaatgggttgaatttaagacttcaaagtttaccagcgatgaatgtgaggaataggtggtcagccaccactgaaaacctatgttttgattgcctgcctatatgatgaatttaaactagaacctcgcaccaagggctttgccgagagatttagtcaaaaccacatacggatagagagttaccaactccctgttgatacaacaccagcaaccaacatttttctctccaatcgatcaaacacattaaaagcttcagcggaacagatttggactctgaactgtacatttttccccctcagctgctactcaaatttgtgttctcaagtgcagtctac

SEQ ID NO: 507 - DNA, 197 bp, Lilium asiatic
  modified_base (11)..(11): a, c, g, t, unknown, or other
  modified_base (35)..(35): a, c, g, t, unknown, or other
  modified_base (37)..(37): a, c, g, t, unknown, or other
  modified_base (44)..(44): a, c, g, t, unknown, or other
  modified_base (69)..(69): a, c, g, t, unknown, or other
  modified_base (72)..(74): a, c, g, t, unknown, or other
  modified_base (76)..(76): a, c, g, t, unknown, or other
  modified_base (78)..(78): a, c, g, t, unknown, or other
  modified_base (81)..(81): a, c, g, t, unknown, or other
  modified_base (83)..(83): a, c, g, t, unknown, or other
  modified_base (89)..(89): a, c, g, t, unknown, or other
  modified_base (100)..(101): a, c, g, t, unknown, or other
  modified_base (135)..(135): a, c, g, t, unknown, or other
  modified_base (153)..(153): a, c, g, t, unknown, or other
  modified_base (157)..(157): a, c, g, t, unknown, or other
  modified_base (160)..(160): a, c, g, t, unknown, or other
  modified_base (162)..(162): a, c, g, t, unknown, or other
  modified_base (176)..(176): a, c, g, t, unknown, or other
  modified_base (181)..(181): a, c, g, t, unknown, or other
  modified_base (193)..(193): a, c, g, t, unknown, or other
gagaccagggngccgccaagaccgagcagccagcngncggaganggagcagaaagagggagaggagacnacnnnanangangncaacanggaggaagaannaaggcggaagcagcagcaccagcagcaggaggcnaacgacgaagacgacgangagncancnggggccccaagagnacagngcgcacagcaanaaaa

SEQ ID NO: 508 - DNA, 323 bp, Lilium asiatic
agaattataggtaacacctttaaatggtttgaatttaaagcttcaaagtttaccagcaatgaatgtgaggaataggtggtcagccaccactgaaaacctatgttttgattgcctgcctatatgatgaatttaaactagaacctcgcaccaagggctttgccgagagatttagtcaaaaccacatacggatagagagttaccaactccctgttgatacaacaccagcaaccaacatttttctctccaatcgatcaaacacattaaaagcttcagcggaacagatttggactctgaactgtacatttttccccctcagctgctac

SEQ ID NO: 509 - DNA, 310 bp, Lilium asiatic
ataacaaccttaaaaagaaggaattcaagacttcggaagttaccagcaaggaatgccatgaatatgtcaaacttacacactgaaaacctataactggatctcctgcctatcacacaaatataaactagaacctaggaccaacggcttagcctagagatttagtcaaaaccacatactgataaatagttaacaacttcatgttagatacaacaacagtaaccaacattatactctccaatcgatcaaacacattaaaagctttagatgaacagattgtgactcttaactgtacatttttaccccttaactg

SEQ ID NO: 510 - DNA, 172 bp, Lilium asiatic
ctatttggggaatgttttgagtgccaatctgtgacatcattcagctaagcccgctgtattaaatactggaatccaaaaatctatgatctgcactaccatacacagatcacctgcttctacaattaaggctacgatgctacctgcgcatagtatacaactaggtgataatgat

SEQ ID NO: 511 - DNA, 351 bp, Lilium asiatic
atcgggggagcgaaacactcgagccagcacaatggtgttcatcatatctcacaagtctatgggtgactttaagagttttctattaaagttggggcgactgacggattgaaagactgattatcgtgccactattcgattgatcaatcatgacaagaacaaatacaacacaccgaaatatcgctttgatgttctatttaccaataatgatattgttgctcaaatagtatccgccagtattgcccttgatatggttcttgcagcagcttatgcccatgaacttcctccttatagacttgaaactggtcttacaaattatgcttcatcctattgtactggactttatgttggccc

SEQ ID NO: 512 - DNA, 305 bp, Lilium asiatic
ggctgtcggatttgactatgatgcctatggagatgttacagcagtgaaattgaccgaggggactagtgctggatgctgacattgttgtcgtgagtgttggtggaagacctctaactacactttgcaaaggccaagttgaataacaaaaagggggaattaacactgatgggttgttgaagacaagtataaccgatgtttactctgtaagggatgctactacattacctatgaagctgtacaacgaaatcaagagagtccatcatgtcgatcatgcccgaaaatcattcgatacatgctgtaaaggc

SEQ ID NO: 513 - DNA, 352 bp, Lilium asiatic
cggacgcgtggggatctgatgagaattcaagggatactaccactcagctagcggaaactgctccaaatatgcagcatattgctgcttctgcgaagccagcggaaactgatgtgaattccagggatactactactcagccatcagaaactggtccgaataagcagacaaattctgcttctcgaaagccagcaggaacaaatgtgaattctagggatactaccactcagccagcggaaactgctccaaatatgcagcatactgctgcttctgcaaagccagcagaaactgatgtgaattccagggatactactactcagccatcagaaaatgctccgaataagcagacaaattc

SEQ ID NO: 514 - DNA, 238 bp, Lilium asiatic
gtgtttgcaaacaaacaagatctgccaaatgcaatgaatgctgctgaaattaccgataaacttggtctgcattcccttcgtcagaggcactggtacatccaaaacgcttgtgctacttctggtgaaagctttgatgaacggcttgactggctcttcatcaacatttccagcaaaggttgattgtgaaactattgatttccaatcttagaaccatatccaacggcgtattggattctct

SEQ ID NO: 515 - DNA, 340 bp, Lilium asiatic
tcgggtcgcgtgggcggacgcgtggggctcttaagaggccagtgttgatccggcacttgggcaagaggtctattttgggaatgttttgagtgccaatctgggacaggctccagctaggcaggctgcattaggtgctggaatcccaaattctgtggtctgcactaccataaacaaagtttgtgcttctggaatgaaggctacgatgctagctgcgcaaagtatacaactaggtgttaatgatgttgttgtggctggtggtatggaaagcatgtcaaatgcccctaaatatctagcagaagcaagaaaaggatctcgatttgggcatgatacaatttgtgat

SEQ ID NO: 516 - DNA, 346 bp, Lilium asiatic
ccgtggaacgtttgaaaattttgcttcaggttcaaaatcctcacaatatcaagtataatggacaatcggggcttgaagtatatatggaggtccgagggttttcgaggactattcaagggcaatggtactaattgtgctcgcatcgttccaaattctgcagtcaagttctttagctacgagcaagcatccaggggcattttgtggttttgtcggcagcaatctggcaatgaagatgctgagctcacccctctactacggcttggtgctggggcatgtgctggaatcattgcaatgtctgctacgtatcctatggatatggtgcgcggtaagattactgttcatactg

SEQ ID NO: 517 - DNA, 385 bp, Lilium asiatic
gaaagcggtgagcacatgcctgacaaaacaaagtttgtaggagaattggcacgggtggcagcccctggtgcgacgatcataatcgtgacttggtgccacagggacctattgccctcagaagattcactgcgaccagatgaaattagcctcttaaacaaaatatgtgatgcctattacctaccaaagtggtgctctgctgtagattatgtcaagattgctgaatcatactcccttgagaaaatcaggactgcggattggtcggagaatgtggctccattctggcctgcggtcatccggtctgccttgacatggaagggattcacatctctgttacgaagcgggtggaagacgatacggggagcgctcgtgatgccactgatgatcg

SEQ ID NO: 518 - DNA, 319 bp, Lilium asiatic
ggaatacccatctcgagccactcatccgcagactccttgacatacacatgtcgcttttaataggaccagtgacggtcccttactagcgcactatcactattgggagaatgtctacacttccaatctaccactaccttcatctaatcactctccatcaagcgctggaatcccatattctttgctctgcactaccatatacaaacattgtacttctacaatgaaggctacgatgctaccttcacatagtatacaactcaatgctatatgatgatcttctcacttctagaatgcaaagcatgtcaaatgcctctaaatatct

SEQ ID NO: 519 - DNA, 419 bp, Lilium asiatic
cggacgcgtgggcggacgcgtggggctcttaagagggccagtgttgatccggcactggtgcaagaggtctattttgggaatgttttgagtgccaatctgggacaggctccagctaggcaggctgcattaggtgctggaatcccaaattctgtggtctgcactaccataaacaaagtttgtgcttctggaatgaaggctacgatgctagctgcgcaaagtatacaactaggtgttaatgatgttgttgtggctggtggtatggaaagcatgtcaaatgcccctaaatatctagcagaagcaagaaaaggatctcgatttgggcatgatacaattgttgatggtatgctgaaagatggtttgtgggatgtttataatgattatggcatgggagtgtgtgccgagttatgtttcagaaatca

SEQ ID NO: 520 - DNA, 297 bp, Lilium asiatic
taatctacatcattcatattcttatattttataaacatggcctactacgttttatatagaaatctttaataccgggtagctactatatgttgtttatatttaatataataatctttctttatctcttatatctaaacattaaattgttatattatctcctaatttcacaaactatctttttttcaattcacaattttttatccatttacctaataccatttctctacaaatctttcccaaactatatcttacaataaacacaattatttaaaaattcttaaaatacttaacaatatc

SEQ ID NO: 521 - DNA, 418 bp, Lilium asiatic
gttggattccataatcgacatgattcagaggcttatattcgataaacgtggcgtactgcattggatagaggaatcttccttgccgaatagctactatctgttgtttgtattgaagatgatgatcttgctttgtcttggatatctaaacattgggtgtgatatgtctcgaattcagaaacggcttttttcaagtcacatttttgaagatttacctaagccattctctgcaaagctttcccaagctatatcttacaagaaacacgatagggtaaaatttcttaaagtacttgatgatgtgttgcatgaagttggggatcctttagtagttatctgctcccaggactgctattcacagttcttgaatttgaatgcttgtgttatcagttctgaaaaaatgaaatgcatggagaatgctttc

SEQ ID NO: 522 - DNA, 253 bp, Lilium asiatic
aacaattgaaaattttgcttcatgttcaaaatccttacaatatcaagtataagggtacaatccagggcttgaagtatatatggaggtccgagggttttcgaagactattcaagggcaatggtactaattgtgctcgcatcgttccaaattctgcagtcaagttctttagctactagcaagcattcaaaggcattttgtggttttgtctccagcaatctggcaatgaaaatgcttagctcacccctctactaca

SEQ ID NO: 523 - DNA, 326 bp, Lilium asiatic
cttcgcaacgatcgggaaaccgggaggtctcgtgggttcggatttgtgacgttctccaacgagcagtcgatgagggatgcgatcgaggcgatgcatggtcagaacctcgacgggaggagtatcactgtcaatgaggcgcagtctcgcggcgggggtggcggcggcggtggatctcggggcagcggtggcgggggttatggcggcggcggtggctcgtatggcggcggcggtggatcctatggcggtggtggtggacggcgtgatggaggcggcggcggcgggtatggtggcggtgggggctatggcggtggtggcggtgggggata

SEQ ID NO: 524 - DNA, 404 bp, Lilium asiatic
gttgcggtggagcatttggagagaatttcgcaaagatttgagtttagtttggataatggggactcgttggtgcagacttgcatgactactctgtcttcgaagattgttagtcgctgtaagcgtatgctagctgagatcgccgtcaaagcagttcttgcggttgctgatctagagagaaaagatgtcaatttggatttgatcaaggtagaaggaaaagttggggggaaattggaagatactgagctcgtatatggaattattgtagacaaagacatgagccatactcagatgcctaagagaatcgaggatgcacatattgctatcctcacttgtccttttgagccaccgaagccaaagacaaagcataaggttgacattgacaccggtgagaagtttcagactct

SEQ ID NO: 525 - DNA, 357 bp, Lilium asiatic
gcgtccgctgaccctagttcaccgactccatgacgacccgcttcaagtaagaaccgctaagaagcgcggtcacgtcaagacctgccactaccgtggcggcaagcaccgcaagcatcccgactgccggggaaactccggtggcatgcaccaccaccgcatcctcttctacaagtaccatactggctacttctgcaaggtaggtatgcgctactttcaccgcctacgcaacaagttccactgcccgttcgtcaacgtcgatcgcctctggagcctggtccctgaggcggcgaaggagcatgccgcggcagacggcggtggatctgctccgatcattgatgtgagcccacctgggtactt

SEQ ID NO: 526 - DNA, 356 bp, Lilium asiatic
ctgatctgttgacattagttggagatccttcgcaaatgaaagagagaaaaggcctgaccgtttctgttgttaagtcaatagttctccgtgagaaggagggcaaaattggcaccgagttatgtgacgatgaggaagtccatcctatgatacgttctttatttcattctgaggaaaatatttctcaaagacaaaattcttctggttcagcaaccctatcaatgacaaaattgtcaaaagatattcgcggggcaccccccgaaagcttcattggtcgactttctggatacattggacgcttcaaatcactgcagaaaatggcttcattttggcggtatggtggtggtgaacttagaaaa

SEQ ID NO: 527 - DNA, 217 bp, Lilium asiatic
  modified_base (14)..(15): a, c, g, t, unknown, or other
  modified_base (41)..(41): a, c, g, t, unknown, or other
agaaaagggggcanngaggagaggagacgcaccgaccgggnactcccctctacaacatcaaggcttatctgcctgtcgttgagtcatttggtttctctgctgctttgagggcaacgacatctggccaggccttgccccaatgtgtctatgatcactgggacatgctgacatctgacccactcgaagctggctctcaagcatctgtgccttgaaccac

SEQ ID NO: 528 - DNA, 408 bp, Lilium asiatic
  modified_base (380)..(380): a, c, g, t, unknown, or other
cggacgcgtgggtggcaatgtcaatttttcgttcaggacaacgtgcaatatgcacaagggcacccagtcgagacctgctgaatatgacttgaaatctgctccgaagcctatgcaaaccccgccctcctatgctccatcaggtggttatatgggaccaaatgctccctcttcaatgtacttgggtggcgggcctccatatggttcgtctgtttttggtggcgcaggtccttatagtcgacaactgtccggaggatctggatattatgactatggcagccgtctttctgttaacagtccttatggtcagttgcacctatctggtccccctcattattcgggtggatccatgcttggaccatgtggtgtatatggtatgcctnctctcatggacaggatatgggtgggttt

SEQ ID NO: 529 - DNA, 212 bp, Lilium asiatic
aaactatgcaaagggttcctatttattctccaagattaaaacgccttcaactgtggcctatagaagcatctgtcataaccatgcttctgctgttcttactcggaggcttttatgtggttcattgtgtatgtgcggcatcataagcttattctgctccttcaatagttttcacttttcgttcacacaatagtttgcatgtctttcaaaatttt

SEQ ID NO: 530 - DNA, 402 bp, Lilium asiatic
cgaagatgaagatgattacagctccaatactcggcctcctcgccatcatcggggtgctgactccatctatcttggcgaatccctatcgcaattctctcaagtccggggaaagtctaaaagccttcgaagctctgagctacaagaacttccttttcataatgcaaccaaactgcaacctcgtcctctaccatgattccaccgcagtgtggtcgaccaagaccggcggccaagattacggttgttacgccacattgcacaacggcggcaacctggtcgtctacagccccaacgccatacccctgtggcagagcggcaacggaaccacaggaggggaatatgttattcttcttcaaaagaacggagatgccgtcatcttcggcactgctaaatggtgggtggtat

SEQ ID NO: 531 - DNA, 384 bp, Lilium asiatic
aagaaactatggaaagggttcctattaattctccaagaggaaaacgccttcaagtgtggcctagagaagcatctgtcattgccattcttctgctgttcttacttggaggcttttatgtggttcattgtgtatgggcggcagcagaagcttattctgctccttcaattgttttgacttctcgttcaaacgatggattgcatgtctttgatgattttcgtgaagcgtatgcatggttaagacataatactgaggtagatgataaggtggcatcttggtgggactaccgttatcaaacgactgcaatggctaaccggactgtcatagttgacaataatacgtggaacaatacccacattgcaactgttggtacagcaatgtcttccc

SEQ ID NO: 532 - DNA, 435 bp, Lilium asiatic
atttcctgaaagaacattcctatcattgtcatgcgaacctaatgaacggaaagaacaaccgaaatcaaacatatcttctcagcacactaacttcctagatctatctctgccttgcaattctgaaggacacattggttgttccaaggacttccaaaacattccgttcgttctcaaagaatccgacagtcacatgaacagtggtcaggtgccatggcacacttcgggtgaaagttcgattttgttcagacacaagaagatagtcgaagacgttattaccggtaccaggatgctgaaagagcgacaaggttcttttcttgacaagtacagtaggtattcgaacgagtggtctgaagatgaacttgatttttttatggattggcgtcagaagatacgggttatacaactggagtggtatgctaagggatccaaaattgc

SEQ ID NO: 533 - DNA, 251 bp, Lilium asiatic
atttcctgaaagaacactcctatcattttcatgcgaacctaatgaacagtaggaacaggcgaaatcaaacatatcgtctcaacacactaactttctatatctatctctgccttgcaattttgattgacacattgattgatccaaggactttcaaaacattccgttcgtactcaaagaatccgacagtcacatgaacatttctcacgtgccatgatacacattctttgaaatgtcaatttttttcattacac

SEQ ID NO: 534 - DNA, 432 bp, Lilium asiatic
cggacgcgtgggttgtagttctctcaccttcgataacgatgtcttcttgctgtggtggaaagtgtggctgcgggtcttcctgcaagtgtggcagtggatgcaatggatgtggtatgtatcctgacttggctgaggggagcactgcctctaccactatgatcatggggtttgctcctgctaagggggagtttgaggggtttgagatgtatgctgagaatggtggctgtggctgcaagtgtggtgataactgcaactgcaacccctgcaagtgtggcaagtgagctctccatgagaggaggatgtagggtttgataccctttgtttacttgtttctgttgtagtgctgaataatggccatggtttacatgatgcaagcttttttgcaccgtgagtggttcaccagtggcttctagtgtcttgtggtggtgctgt

SEQ ID NO: 535 - DNA, 429 bp, Lilium asiatic
tcaggatgccataaattcctatctggtgaaggaaacatccatggaagaagtggtatgtatgtattacactatagagatgcttgacatgttggaagttctgcatgatgctggtattattcatggtgatttcaagcctgataatctacttgttcggtgtgcaagggatgagctgacagaggatggattcagggacagaactggaccttggcgtgatcagggtctgtgcttggtggactggggaaagggggtcgacctaaacctctttcctaccaatacggaattttatggtgattgcggaacatccggcttccgttgtattgagatgcaagaaaatagaccatggagatatcagactgactcctacgccctttgcgttaacgtacatatgatgctccatggggcttatatgaatgtcgaaaaaaaatcaac

SEQ ID NO: 536 - DNA, 411 bp, Lilium asiatic
gacaaggtctctatcgagcgctgcgatgcaaggagcccccatcttcagaccgtctttgggcaaggcatgttctgttcgagggctgtccgtgttttaaatttggtttcatggcagcaaatggagcaattgctgaggcgttgaaaggtgaagagagggttcacattatcgattttgacatcaaccaaggaagccaatatatgacactcatacaagcaatttcgacccggtcagtcaagccgcgtaagttgaggataactggagtcgatgatcccgaatcagtgcaacggtccgttggaggattggaagtcattgggaagcgattagaaaagtttgcataggatgctcgtgtcccatttgagttcctagcgatcgctgctaagattggagatgttagaccgtcaatgtttgatt

SEQ ID NO: 537 - DNA, 431 bp, Lilium asiatic
gattaatcttgttgtctctatactcagtaaggtttggccgtatgaagaaaatgataagtacggttttgttcaacagctgtttatcatgatgcggtctcttttcgatcgggatttcagctcttccaaatttactcaaccattggattcactagagaggcagaaaaagtcggagctgttaatctttcggctatgctttaacctatgctcttacctatactttttgattagaaagaagaccttgagacttcagattttagatgctcctggtgatcaaccaacactacttttacttgtccaacttctcaattcattaactctttctctggaaaaggcgggtgaagaaaaatacttactgcttagcaagattcaagatattaatgaactatcaagacaagaggttgacgaaattgtcaatttgtgtatgagacaag

SEQ ID NO: 538 - DNA, 433 bp, Lilium asiatic
ttgaaaacgcggctacacctcctttgccctatgctaattcacctagatctaggacaaatataatgaatacaccttcacctcagcaacagacacaacagcaacagcagagacagaagatgatgcaaatacctcaacatcagcagcaactcattggtcaacaacaattgagacaaacatcaacagcaggagtaatgggacagaatgcattatcccaactgcatgatttccaggggcaagcacaacagaagtttcaaccgatgcctggcgcgcatcagatgcaattttctcagcctctagctccacagcagtaccagaatagacaattgcaatctgcacatatgcagcataatattgcacaaagtcagatgaaccaaggaaatcaactaaggaaccatcatttaggacagttctctggctctgctaatagtgcctt

SEQ ID NO: 539 - DNA, 421 bp, Lilium asiatic
ccacgcgtccgcggacgcgtgggatgaaattggatgtcaataggaagaataggtcctggaagagtgaccgtgaacataagtttgggaagcacgtctatcccatcaatttccagaacgtatccttaattggtggagggaaacttgactcacacattcctctgagtgagcaggaggatctcattgtatggatgcgtactgccgctcttcccaagttccgcaagctatatggtgtagggaaacttgactcacacattcctctgagtgagcaggaggatctcattgtatggatgcgtactgccgctcttcccaagttccgcaagctatatggtgtaattgaacatgacctagaacccggagacctcataactgtacatcttgcaaataactacaacacttacagctttttcttcccaccaaagct

SEQ ID NO: 540 - DNA, 427 bp, Lilium asiatic
cggacgcgtgggtgtcaccccatttatggaggaccatcctggtggtgatgaggtcttgctagccgcaacaggtaaggatgctacagacgatttcgaagacgtggggcatagcacatctgctagggagatgatggacaagtactacattggcgaggttgatgtgtcgagtgttcctacaaagcgtgcttacgttccaccccagcaggcaccgtacaatcctgataaaacttccgacttcgtgatcaagatactgcaatttgcagtgccattgctgattctaggtttagccttcggagcccgccagttcaccaaatcggagtaggcactatctgtggcattctcaaaggctattatgttatcgaatctatttggaacttttatatcatgtttcgccttaaaacttatgttgtctgtcccgtaagggccg

SEQ ID NO: 541 - DNA, 428 bp, Lilium asiatic
cggacgcgtgggcggctactttccacaacccctcgtcctacatctgatgaagccatattggatattgtctccattactgattcagactttccgcttcctgggacccgaatttacaccgcagagatacagagtgatggctatagtgaaactgaagacgaaacaaacatcgaaaccgaagcagagcttatggcaatggctacgacctgattccgaggttgaggcttaggggcaatacaagattaaaggagttaacagtgaacaaagtatcaatatattctgcgactatcatggtctgttaatctggcgcagaggctatttttcagtctcaatctagtctaattctaccaccatggtctgcagtggttgacgaaatattcttgtcctagtgccacgccttggaggccagctaactattgtatttgcctaag

SEQ ID NO: 542 - DNA, 431 bp, Lilium asiatic
gcgccgccgctctcgccccctcctccctccccagaattctcagccccctcaccggcggcgatggcagtagcggtgactcaggaggttaagctcttcaatcgatggacctttgatgacgttgagatcagtgatatgtcgcttaatgactacattgctgtcaatgtcacaaagcatgctacctacctccctcatactgctgggcgatactctgtcaagaggtttcgcaaagcccaatgcccgattattgagaggctgaccaattctcttatgatgcatgggcgcaacaatggaaagaaactaatggctgttcgcataatgaaacatgccatggagattatccatctgcttactgatgccaacccaatccaaattattgtggatgctgttatcaacagtgggccacgtgaagatgcaactagaattgggtctgc

SEQ ID NO: 543 - DNA, 420 bp, Lilium asiatic
  modified_base (377)..(377): a, c, g, t, unknown, or other
  modified_base (385)..(385): a, c, g, t, unknown, or other
cggttcggaatcccggtcgcgcacgcgtccgccattgttgctctcgctgatcctgagctgctcaatccaagcacatccaatggccgggctacagataatcgggtcctcaccgacggcgatggccggaaatcggccggtgccgtgctttgacgggctccgactcgcgccgtctgggatcaggatgttctcatccgcgggcggctgccggttgcggtccgagccgagggggttccggagtctcgtcgtcaaggccgccactgtcgtcgcgccgaagtatacttcagtcaagcctttgggtgatagagtgcttgtcaagatcaagtcatctgaggagaaaacaactggtggtattttgctttcgacaactgcccagacanaacctcangctggggaagtagtcgcaattggagaggggaggac

SEQ ID NO: 544 - DNA, 429 bp, Lilium asiatic
cttgaaaatgctcgattatataagtgtatttgataatattttaacctttttcgttgtccatatgaacattattgatgatgtttaattttttgcataaagaaggcaatagtgtaaaaagaggcttaaagtggtgagcatgaacccactacaatactcacctccaagaagaaagtcatgcaaatgttcaaagcaaatcctgtgtctccatacttttttgcaatcacaccagctatgcggccacaaacagcacggtcaacattatagatttctattgatttagtaacctccttttcatgcgcaattgcctcagatatctgcggatcagaaagtatggtttcatctagaacaggaccatttgtatgaacatcctgattcctgatctgactgctgctccattttggcatgccaacattcgacaaaatgtaactg

SEQ ID NO: 545 - DNA, 428 bp, Lilium asiatic
cggacgcgtgggcggacgcgtggggctgcttctttatcagtacttctcaagggacttgacccagttctccggaatgtagcaaatctgggaagttggcaggtcataagccctattgaagttgctggatacattgttgtcgtggatgaattgcttgctgttcagaataaaacctattcacggcctacaatcttagtggctaaaaaggttaagggggaagaggaaataccagatggcgcagttgctgtgctaacacctgacatgccagacgttctctctcatgtctccgtgcgagcaaggaatgacaaagtatgctttgctacatgctttgatcctaacattttgcaagaactacaaggaaatgaagggaaattatttcgcctgaaacccacatcttcggaagttgtatatagcgagataaaagagagtgg

SEQ ID NO: 546 - DNA, 428 bp, Lilium asiatic
cgtaagtgagacgactgccaactccattgtagttgtcaacctggatgacctcgagacggatactcctggttgcgctttgtgacctttttcgattaattggcaggtagcattcacccggtatgggagattttttatgttcaagagcaagtgttgtgggctatgaggcaattattcgggaagattgatatggaaattctgatgtcgtatttgtaaccagagacctttaagtttcatgtggagcgtcacatagaagtgagattagggaagtagtttgacattgtgcttggcatgataattgatatggatagaatagttggtggaattgtaaaggtattgacgagttgcagttctcagatcatgacatctgataatcgcttgtacgatcttgcgaaggccctcaaccaagaaatgcttacgcagattgaaga

SEQ ID NO: 547 - DNA, 335 bp, Lilium asiatic
cgtaagtgatactactgccaactccattgtagttgtcaacctgtatgacctggatacgtatacttctggttgcgcgttgtgacctttttcgattaattgtcaagttgcattcaccctttatgggagactatttatgttcaatagcaagtgttgttggctatgatgcaattattctgtaagattgatatttaaattctgaagtcgtatttgtaaccagagacctttaattttcatgtggagcgtcacatataattgagattagtgtagtattttgacattgtgcttgtcattataattgatatggattgaatatttgttggaattgcaattgtatt

SEQ ID NO: 548 - DNA, 429 bp, Lilium asiatic
gcaacatacacaccggagtcaaggttttcagctgttcgtcagtttcttcgagatttatggtggaaaactttacgatctgctaaatgaaaggagaaaactttgcatgagagaggacggaaaacaacaagtctgcatcgtcggtttgcaagagtttcgggtttccagtgttgagaccataagggaacttatcgagaaaggaaatgcaacccggagcacaggcacaacgggcgcaaacgaggaatcgtcacgatctcacgccatacttcagctcgttatcaagaaaccagtcgaagttattgaatcgaaacatacatttaagagattagcagacggtaatgaaccaaagccagcccgactcatcggcaagttatcatttattgatctcgctggcagcgaacgtggagcagataccaccgacaatgacaaaca

SEQ ID NO: 549 - DNA, 434 bp, Lilium asiatic
cggacgcgtgggcggacgcgtgggcggacgcgttggcggacgcgtgggcggacgcgggggtttgtcgagtcttacatctctatcctcaaatcgagagagacttagggttagggtttcccccatcgccggcgaagatgatcgaggtggtgctcaacgatcgcctggggaagaaggtgcgtgtgaagtgcaacgaggacgacacgatcggcgacctgaagaagctggtggcggcgcagaccgggacccgcgccgagaagatccgcatccagaaatggtacaacatctacaaggaccacattacccttggggactacgagatccacgacggcatggggctcgaactctactacaattgaagtttgatgttcgctgattctgtctaattcacctatttgctaactttgtatgtaaccgtgggactggatcttgatgat

SEQ ID NO: 550 - DNA, 381 bp, Lilium asiatic
gccacgcgtgcggccactcgtgcgcgcacgcgtccgtactcgcggatcgtcggctgccacggggtctggtacaagcttgcgctgatcatccccacggtgttgttcattgcttacctcgcctctcaggcacggaagagcttcgcgaagctcacgtatggccgatcgtacatcatgattgcgtactacgcgctgctgtggatcgtctgtcttcttaatctcgcctggtgcgttttccaggcttggcagtgtttgcctagcaaggagttctcttggaatatgttatcattgtttacaaaatctgggatgctgtttttggaaataagcttgatggcctttctactccaaggaaatcatgctggtggattggaaagcgtgacacgt

SEQ ID NO: 551 - DNA, 434 bp, Lilium asiatic
ctactgcttagatctgaagttctccgacgcttccccctcccgtcttctctctcccccctgtgatgcaatggctacagttgaggttcaatctgccacatctgtcgtgcctacaccagaggtccaacaagaagtcacaaaagatgtacaagccgaaaaagcaacggaagaaatatcagtagagaagccaaaggaggaagcaacaataacaatcgaagctccaactgaacaggtgaaagaaactgagatcaccaaagaggaagaagcaagtgaagtggtagaagttcacggaactgagaccctgaaagaggaggaatcaatagaaggggaagcaaaggtagatgaactagctgtagaagcaacacatgagaatatagaggatgttgaagatgctactacggtgaccactaatgaggaagctatagttgctgatgatg

SEQ ID NO: 552 - DNA, 347 bp, Lilium asiatic
gggagcttcttcgtggccgtcggtcgaggagcttgatggggtcaagaaggtggttgctgaaatgagcgggggagatgccggggatgtgagggttgtcgtctcgccgtaccggatttgcccgctgggagctcacattgatcaccagggtggaacagtttcagcgatgactattaataagggaattattctggggtttgttccttctggaggtgctcaggttttcttaaggtcaggacaatttgaaggagatgtgaaattcagagttgacgaagcacagtgcccagggaatgctaggccagttcaggaaaatgtgtcactggtaattcacgaaaagatggattggggat

SEQ ID NO: 553 - DNA, 423 bp, Lilium asiatic
  modified_base (414)..(414): a, c, g, t, unknown, or other
ctgtgtataaaatgaaagctgaaggggcaaattctggctattctactggtaaatctgtggaggcctccacaataaatgaaatgcaattgtcagagaatcagactggtcattcaaatagaaatgggaatcatgctactgaacttccgaaggatatgacttcttccaataaaaacaactgtgtagatcttgagaccagttcacactctttctcggatgatgatgcttttgagccaactccaaacttgtacagacctcgaactacattttcaacttggcaaaataaatatgaatttcagaaaaataaagaaagccttaagccatctatatctcaacatggactcccttctttcccgacttcagaagttgtttcgatgcatggaaatgatagtcacactagtggatcctggaacttgngcaatggtg

SEQ ID NO: 554 - DNA, 457 bp, Lilium asiatic
aagtgtttggggctcaaatgggtttaagtgataaggatattgttgccctgtctggtggccacacactgggacgctgtcacaaggaacggtcaggttacgagggagcatggacaccaaaccctcttatctttgataattcgtacttcactgtgcttttgggtggggagaaggaaggccttatccagcttccttcagataaggctcttctggctgatcctgctttccgccctcttgtggaaaaatacgctgctgatgaggatgctttctttgctgattatgctgaagctcacatgaagctttctgagttggggtttgctgatgcctgaggagaaaagaggcaagtgtgttagggaagacattttgtttttgttgctctggtaattttgggtgcttactttagacataaagcagattatgttaaagcgcatctctgtaataagaaccccgtggctgtact

SEQ ID NO: 555 - DNA, 423 bp, Lilium asiatic
  modified_base (245)..(245): a, c, g, t, unknown, or other
  modified_base (313)..(313): a, c, g, t, unknown, or other
ccacgcgtccgcccacgcgtccgcactcgtggatcgtcggctgccacgggctctggtacaaccttgcgctgatcatccccacggtgttgttcattgcttacctcgcctctcaggcacggaagagcttcgcgaagctcacgtatggccgatcgtacatcatgattgcgtactacgcgctgctgtggatcgtctgtcttcttaatctcgcctggtgcgttttccaggcttggcagtgtttgcctagncaggagttctcttggaatatgttatcattgcttacaaaatctgggatgctggttttggaaataagctngatggcctttctactccaggaaatcatgctggtggattggaagcgttgacacgtacctttgtggtctcaggagtcattgatgctggtgatatactgcttaaggccatcta

SEQ ID NO: 556 - DNA, 387 bp, Lilium asiatic
acggctactcgatgcgtcaacgctttattcactggattatatacaacagttccggagagctattacatggtgtgaactcatcttcatccacgagaagagaatattgctcaggatcaattttacaacttcaaaacaccttccacaaagcatgatatctctccatgtgttaacacagagggacacatcatatcacatgctgatggctggttttgactttcaacaagcatttcgtttctaggaatcatgccatgacgactaccatgaagcaccatctcctgacgaatggatgaaggcggaaactgtctgcacgtaccttaagctcttgtacgactccgcaaagactgtcacgtctacaggctacccaactgcgaacattttcttccatga

SEQ ID NO: 557 - DNA, 256 bp, Lilium asiatic
gccgcggcggcggcaatgtcgatggaaccactctctcctgacgccggcatgtacgtaggcggtgtcgaccatttcgctgatgcgagcagctccaatgagcaatttgaactattgaggatgcgtcttcatgggctaacaggagaaactaggcttgagcaagaggacgatacaagattggagacaacgctgatgagattcgccaatgtactcaaaaggttcaagaatttggtggatcgtgttacaagggattctgaca

SEQ ID NO: 558 - DNA, 468 bp, Lilium asiatic
gccgcggcggcggcaatgtcgatggaaccactctctccggactccggcatgtacgtcggcggcgtcgacgagggcgctgaggcgagcagctccaatgagcaatttgaactattgaggaggcgtcttcatgggctaacaggagaaactaggcttgagcaagaggaggatacaagattggagacaacgcggatgagattgtccaatgtactcaaaaggtttaagaatttgtgggatcgtgttacaagggattccgacagattgatttatgagcgtttacaaaaagaatttgatgttgcaagagctgctcaaaccgaagagatacttttgaagggtgacgagtggaatgatggactgctagctacaatcagagacagggttcatatggaggcagatagaaaggcaatgtcaagccatactagcatgccattcgatcctcacactaatgcgagaattacttatagagtacga

SEQ ID NO: 559 - DNA, 400 bp, Lilium asiatic
aaaaaatcacccattcctaacaaagtttttcaacagtcctaaagccaaggctatgctctttgtgaacttcatcaatgagtatgttgattctttcaagtctaagtactatgaagttgctgcgagcttcagaggaaatgatattatctttctgattggtgatgttgatgccagtcaagccggctttcagtactttggtctaaaagaagaccaagcacctctcatcatcatacaagagcaagatgccaagaaatacttgaaagaaaaattggaacctgaacaaattgccgcatgggttaaggagtatacggaaggcagcctgacttcgttcagaaaatcagagccgattcctgaagtcaacaatgagcctgtcaaggttggtgtggctgacagccttcatgat

SEQ ID NO: 560 - DNA, 473 bp, Lilium asiatic
  modified_base (405)..(405): a, c, g, t, unknown, or other
gttcaggaattaaagggacgtgatcagaaaagaagttgagcttacaccatggcactcaccacaatccttctgttgagtagtgtgctagctcttttaagttctcctacaactgcccaaattgtggccactccaacccctgcaccagcacccgccccacacctggcgaacataagctccctactgtccgtcgccggcccattccagaccttcctcaactatctcgagcaaacaaaagtcatcgaaacctttcaaaaccaagcaaacaacaccgaccagggcatcaccatcttcgtaccgaaggactccgccttctcgtccctcaaaaaaccgtcactagccaacctgacccaagaccaactcaagtccctcctcttattccatgcattccctaagtactacactctntccgatttcaagaacctgagcaatgctaatccagtcagcacttttgctggtgggcagtacactgtgaa

SEQ ID NO: 561 - DNA, 431 bp, Lilium asiatic
aaaaaatcacccattcctaacaaagtttttcaacagtcctaaagccaaggctatgctctttctgaacttcagcaatgagtatgttgattctttcaagtctaagtactatgaagttgctgcgagcttcagaggaaatgatattatctttctgattggtgatgttgatgccagtcaagccgcctttcagtactttggtctaaaagaagaccaagcacctctcatcatcatacaagagcaagatgccaagaaatacttgaaagaaaaattggaacctgaacaaattgccgcatgggttaaggagtatacggaaggcagcctgacttcgttcagaaaatcagagccgattcctgaggtcaacaatgagcctgtcaaggtggttgtggctgacagccttcatgatgtggtcatcaactctaagaaaaatgttctga

SEQ ID NO: 562 - DNA, 450 bp, Lilium asiatic
ctccccactttcaaaattttgagggagctgtagtgatggagtctggaaagataaccaagggagctgctgggcgcaagggcggggtgaagaagaagtctgtcccgaaatccgtcaaggctggcctccaattccccgttggccgcatcacccgctacctcaagaagggacgctatgccaagcgtgtcggatccggagctccagtctaccttgctgcggtccttgagtaccttgctgctgaggtgctggagctggctggcaatgctgctaaggataacaagaagtcgcggataattccaaggcatgtgtgtttggccgtgaggaacgatgaagagctgagcaagttgctggccggggtcaccatcttctacggaggtgtcatccccaatgtcaacccggtactgctccctaagaaggctgctgaaaaagctgattcttgctggacccccaagt

SEQ ID NO: 563 - DNA, 432 bp, Lilium asiatic
cccacgcgtccggggttcagaaggagctgaaggaatgcaaccgcgacacggcggtctccggcgtcagcctcgagcctgccggcgccggcgccgccagcctctcccacttctccggcaccatctcgggccccgtcggcacgccctacgagggcggcaccttcaggatcgacatcaaactccctagtggttatccttttgaacctcctaaaatgcagttcgtgacgaaagtttggcacccaaatatcagcagtcagaatggtgcaatttgcctggacattttgaaaaatgaatggagccctgccctcactctgaaaacagcactgctctcactgcaagcccttctgtcagcgcctgagcccgacgatccccaggatgcagtggttgcacaacagtacctgcgtgactacccacagtttgctgccacagctcggt

SEQ ID NO: 564 - DNA, 453 bp, Lilium asiatic
gctctcgatgtcctagcttctattcatggtatcatatacaacattcgggaaagcataaagtatgtcaaagcatctccatcccgagaagagaaattcgcggggatcatctcacaacttcaaatccctcccacaaggcagctatcgctcgatgtcttaacacagtggaacacaacatatcacatgctgctggctgcttttgacttcaaacaagcatttgttttcttggaatcatgcgatgacaactacaatgaagcaccatcaccggacgattggaggaaggtggaaattgtctgcacgtaccttaagctcttgtacgactccgcaaagtctgtcacgtctacagtcgacccaactgcgaacattttcttccatgatgcgtggaagattcagctagagctaacgaacggattggcgagtgaggacattatggtgaggaatattggtaaagagatg

SEQ ID NO: 565 - DNA, 433 bp, Lilium asiatic
gcaggacggacttcctactatggaggaccaagtgaagccgttataatctactatggcagagcgaggtgattgctgcacggcatcttgccgttgtgagtcggaatagactgacatgtatgaactcaactatgccgtgctaggagctgttataacgttccacataccggatgtggatgcgtggagtacttgctatggtcatgatctggatgtaggactactcgcctctcatcatgacacagcaacatgatgccaggaactacttgaaagaaaaattggggcctgaacatatagacgaatgaatcttagagtctactgcatgcaacctgactgcgttcagatagtgagagccgattccagatgactgcactgagcctgacaaggtggttgtggctgaacacctgcatgatgtggacatcaactctaagaaaatgtt

SEQ ID NO: 566 - DNA, 434 bp, Lilium asiatic
gaaaagttccagcttcgtaatcatttccgtttcgagtggccagtaaaccatacatcgattagtccagatcggaaacttgtcgtcgttgtcggagatagccccgagggactactggtggatgctaatactggaaagactgtccaggatctacgcggtcatttcgatttctcgttcgcatcagcgtggagccctgatggccatacgttcgccactgggaaccaggacaagacgtgtcgcatttgggatgtccgtaacctctccaaatcggtggcagtcctgagaggcaaccttggagccatacgatcaatccgtttctcttctgatggcaagttcatgctgatggccgagcctgcagactttgtgcacatcttcgatgtaagaagcggctatgagaggagacaggagttggacttcttcggtgagatctcgggtgc

SEQ ID NO: 567 - DNA, 270 bp, Lilium asiatic
gagaggttccagctccgaaatcatatccgtttttagtgggctttataccatacatcgattagggcaaattcggaacttgtctaagttgtatgagatagccccaacatactactgatgtatgctaatacttttaagactgtacacgatctacacagccatttctatttctcgttctcatcatagaatatccctgatggacatacttacgccactggcaaccatgacataacttgttacatttggtatgtccgcaaccttttttaatctggt

SEQ ID NO: 568 - DNA, 442 bp, Lilium asiatic
cttatctgctgagggcgacttcctgggagttttatggcagcgccccactagttcgaacaaatgcgttggtttatgcaacctgctttgctgatgcttcaagttcaaaagagctgtcactggcatatattaaactcatacaacatttggcagtattcaagggttataaagaagcctttactacattgaagctcgcagaagagaagttctcatctatagctaagatacgtattcagttacttaagctgcagttagtccacgagcgtgctttgcatagaggacatcttaaagttgctcaacaagcatgtgatgagtttggggtgctggcctcatctgtcagcggagtggctatggagatcaagactcaggcaagcctacggcatgctcgtacactacttgctgctaaacaattcagccaggcagcagctgtggcacattctctttt

SEQ ID NO: 569 - DNA, 470 bp, Lilium asiatic
ggtcagccttcgcagccttccaacagtgcatgggtcgagcagtttgggaatcactttgttgacgccggatgttcaaattcaaactacgcagatcaaatggcttatatgcatggtacacctatgaacccgggggctgtggagattccaaatttgggcatgcagaaataccaggatatgtcatccaacagaggttctggatttgtcattcatcatccagctccgcccaacttttatcagcatccaccacctatgcaaaacatggcagttaatacttatagccatcattctcagacaccattaccttcctactcgcatatattcaacaatatgcacgcaaacaatgtatatcctccaagggttgatgtagcttcggactccagtttccagagctcctttaatcccatatctgaccgagtcaacataccttctatgcatgaggctgctccagaaattatccatgaaagtttcag

SEQ ID NO: 570 - DNA, 461 bp, Lilium asiatic
gggatttgaggactcggaattggatagaggctgacttcggcgacttgtggtactttgtcttacatcttcatcatcctcaggttacatattttcttccaatatattcctcgcctcttccaacttatctagcttcttagcatccatgtacattttaatttctaaacgcacattggccggaacatctttacaacttgcagcatttctatatcctcccgcaagatgctgttttccacgaaaaataccacctttgagtattttactacaaaaacagcacttcacattacatgttttgggaggatcaaccaacgtaaaatacttccatgccaagtcctttagtgtaccagtagctccagtggtactaaaactgccactgccactacctccactttcggtgttagtattcatgtgaaaatctgcaaaaaatatatgcaaaaacaagttgaaaatcagaaattaatatt

SEQ ID NO: 571 - DNA, 305 bp, Lilium asiatic
atcagaagaaggtaaagaagagtcagcaacataagcttgggtccccagtgaaggcagtctctgtaaagaaaacatcgacaatctctgtgaaaaaagtaacaaaaacctgctctcagactgtatcaaagacgccaacgtctgagaagcagcggaaagccagcgaatctgaaactgatgatgatgacaactttctgtcaaaaaggacgccgaagtcggtgaaaaagaggatagccaatgaatcagaatcagatgatgacgatttcgtgctgtcgaaggccatgatgaggaaggtttgaatgataatg

SEQ ID NO: 572 - DNA, 468 bp, Lilium asiatic
gttgaatgtaaggatacattttattatccagagtttgatcgagtaagaggacagccccttccttttagacgccaaggagggccgccttacaacacaagctgattcgttgtttcctttaaaccacatgttttcatactagtaattgtatactttcgatgcataatagttctgcattactccatattcatctatataccaattttttttcagtctagcatgtaaatttttataaaaacgtgtgcgagttttttctttcttatgttggagtgcgacttttctacttgattatatcgtgattggttatgctaaaagaccaggactccgaacttcattatttgaatcagatacattaccttggatatatttaaaagtgattggtggttagtggacattgttaggcttgcaattgaggaagcaacttgctaatggctccaataccatgaactatgaagcacaatgttgaaatgc

SEQ ID NO: 573 - DNA, 406 bp, Lilium asiatic
  modified_base (373)..(373): a, c, g, t, unknown, or other
  modified_base (378)..(378): a, c, g, t, unknown, or other
caacacctcgcgccagccatgggtcgaaggccagcaaggtgctatcgccaaatcaagaacaagccttacccgaagtcccgctactgccgtggtgttccagacccaaagatcaggatctatgatgttggaatgaagaaaaagggagtcgatgagttccctttctgtgttcaccttgtcagctgggagaaggagaacgtgtcgagtgaggctttggaggctgctcggattgcttgcaacaaatatatgaccaagtttgctgggaaggatgccttccatctacgagtgagggtgcacccattccatgttctgcgtatcaacaagatgctttcgtgtgcaggagctgataggcttcagactggtatgagaggtgccntttgngaagcctttggaacatgtgctcgggtta

SEQ ID NO: 574 - DNA, 128 bp, Lilium asiatic
caccacctcacccaaccatagatctacctttacaacgcgcttatcacaactcaacaacaagccttaacgggagtacctctacactcgactcactacactacccaattatcaatatctatcatgcttat

SEQ ID NO: 575 - DNA, 377 bp, Lilium asiatic
cggacgcgtgggcggacgcgtgggctcgccgccggctccgctgcattgtcgaagattcatggggggcgtactctgaatatgaaggtgatggtggatcccgatgcaccgagtccaagcaatccaaccgaatgagagcatctacattggatggtgacggatatacccgagacaacaggattctgatttggtaatgaaatagtcagctactagagcccgctggcttatgctgggataacatcgatttgcctttgtgttgttccgacagacaatccagcatactatatatgcacctggattgcgacagaatttcaacacgagggacttttctgcgctctacaacctaggacctaccgttcactccatatacttcaactgtc

SEQ ID NO: 576 - DNA, 467 bp, Lilium asiatic
atactgggatggatgctaaacggattctgcagttccatgatcatcttcctgttcatcaacaactccatcacgaatagggcgttcattcagggcgggcgtgtggccgatctagaacttctcggtgtcatcatgtacacatgcgtcgtctggaccgttaactgccaaatggctctcttcctcagctacttcacatggccccaacacgtctgcatctggggtagcattttcctctggtatatatttgtgatagcatatggcttcttcccgcccaagatatcgacatctgcgttccttgtttttctcgaggcctgcctcacgactcctatgtattggctggttactcttttcgtcgttgttgcggcactcttgccgtattatctctactcgacagtccagaccatactttttccacggtatcataatctcgtgcagagacaacagttgtctaaagatgattaaattggacg

SEQ ID NO: 577 - DNA, 396 bp, Lilium asiatic
cggacgcgtgggcggacgcgtgggggcaattttcagcagggagcctgcgactcaccggactctgacactatactggagaagattatctcagaactgatctgttattcatttgctgctttcatttgttaattcatgtcaatgtttactaatccttatagagcgaaaatccttttgaacatgtattgaaccaaggttctaaaaggcgctaggctaccaatcagccgctgtagaggcccgcaatgtccgcttgtctaggctttcttagtcgtgcctagacattttggaatcctttagataaatacatgggtattgtatactaggttattgaaatgcttatcgtatcacatgtccgataccgcatttcatgaaatgcgtatcaagacatatctgtttcgt

SEQ ID NO: 578 - DNA, 149 bp, Lilium asiatic
acgcttgctgtcaagaggcttctgcgtgcacatcatgacatcgcttttaaagaacttcagaagcttacagcattctgatccttctccaaagaatttccggagttccttgcgagcatcctgatttagatattgtctacatttcactttca

SEQ ID NO: 579 - DNA, 370 bp, Lilium asiatic
acgcttacgcgtggcctgacgcctggtgtccgtagccaactggaaagaactgcctgtagagggtagggtcctagtgcttaaacccgctatgcctgttctgatagagatgggaattcgatatcatatggttactcttggctcatatggcgttttcttgagctataatgcggggcatgctatatataaatggatagacatataaaaacatagcgtacttatatctgcaaactgcatagacttatcagtgaactttgcctcctaagacaatacaccggttgcatgaaatcttgattgtacatctgtatgcattatgcattccatgttccatctctacatgcatcagtggtgagccgtacaggagcatgtgact

SEQ ID NO: 580 - DNA, 444 bp, Lilium asiatic
atcagaagaaggtaaagaagagtcagcaacttaagcttgggttctcagagaatgcagtctcgggtaatataagcgatcgacaatctctgtgaaaaaagtaacataaacctcctctcatactgtatcaaagacgccaacgtctgagaagcagcgtaaagccagcgaatctgaaactgatgatgatgacaactttctgtcaaaaaggacgccgaagtcggtgaaaaagacgaaggccaatgaatcagaatcagatgatgacgatttcgtgctgtcgaaggccaataataggaatgtttgaatgataatgcttgttttcttaaactgtatggacctctggtaattaaatggcctaaacatatggtaagttgatataacaccctgaaccaatttttataatatctctttctttccaatgattttccaaagcttgccaaatcttgtttt

SEQ ID NO: 581 - DNA, 325 bp, Lilium asiatic
cggacgcgtggggtttgatgcgtagtacaaaaaaaaaaaaaaaaaaaaaaaaaaaaaaaaaaggaaaaaaaaaaaaaaaaaaaaaaaaaaaaaaaaaaaaaaaaaaaaaaaaaaaaaaaaaaaaaaaataaaaaaataaaaaaagaaaaaaaaagtaaaaaaaaaaaaaaaaaaaagtacaaaagactaaaattagaaaaccaaagaaaataaaaaactaagggtattaacaaaaaaaatatctattaaaacaaaaggattactaaagaaaaatagctataaaaaaagtcttccctaaaaaatataaggttaaaatgatgaaggg

SEQ ID NO: 582 - DNA, 387 bp, Lilium asiatic
  modified_base (371)..(371): a, c, g, t, unknown, or other
ggcatcaccaagccggccatccgccgcctcgcccgccgcggcggtgtgaagcgcatcagcggcctcatctatgaggagacccgcggggtgctgaagatcttcttggagaacgtcatccgtgacgccgtcacctacaccgagcacgcccgccggaagacggtcacggccatggacgtcgtctacgcactgaagcgccagggacgcaccctctatggcttcggcggctaatctatctatctatcttaaggttccgcggatgaagctagaaatcaaatcggtctcctcttatcttaagagtgttaagtttgtgatgtgaatcttcgttttttgttttcttctaaacatggagctgtattagatctttgtgagtntatgagctgttttgct

SEQ ID NO: 583 - DNA, 399 bp, Lilium asiatic
gcctacttgaaatggagcgcactggtgtccttgctctgctaccaatgtcgttcacagtacggggccatctttgccatcagcacgattgccactgcagagcagttgcgcagcctagaggatgacaactacgtaggaatccagccgtgctgtaaccagtgtggtttctgcacgaggtcctttccttcactgtgcacctgccgtgatgagaagcatatctgcccatcctggtgcaagaactgtaagatgtcgccgaagatgatctatccgtcgctatacatttgtcaggatcctattgtcaactactgcgatcacaactgtggcttggaaggcagagcttgcacatctgagtaactagctgcgcagcaggttggcccgtgaccatatggataagtgacggtc

SEQ ID NO: 584 - DNA, 296 bp, Lilium asiatic
  modified_base (170)..(170): a, c, g, t, unknown, or other
attttgttccggctggaggcgccggacgtgaaggaagcggtggcgcaggcggtggaggctggtgctgtgctcgatggtgagatcgctgaggatgatgggccatgcaatggcggcttggttgggaaggtgaaggatccgtttggttttgtctgggttatagcttctgctgngaaaggtggttgtcaggcttagggcaaaggcctgatggtggttcctttttggggaataaggccgctattatggtaagggttaatcctgccttttggtctggttggttggttaatggaatggtatta

SEQ ID NO: 585 - DNA, 74 bp, Lilium asiatic
ggccagatatttccacacccaaaggcgtgctcagagttatgggtgtacaaggcttgaccatttaccatgtcaaa

SEQ ID NO: 586 - DNA, 428 bp, Lilium asiatic
acgccacgatatattttgtgtatctttggtgtcgatgttttgttctcttaccggagagacaagtgatcatctcatgttgccctctacgtctttctaggtataactccgaacacaagggctatcattgctacgatctcaacgctcgtcgtgttcgtagctcgtggcatgtcgaatttgatgaatttctaccttattttccaaataaggagctcgatcttagctttctcacaatttcgactactcgcccctctatacttggtccgcctgcctcaacctacagctcctcggctcctttactctgtttggttccttcactcccttcttggaaaaatcaaccttcatctgtctcggctcctccagttgtaccaccctcgtatccttgtacctcaatccacaggcccacctactacactgtatagggcctacag

SEQ ID NO: 587 - DNA, 326 bp, Lilium asiatic
ggaggttggtgctgagtctgctgaaggtgaggatggtgaagaacctgaagagtattgagcaggtacctatcgtaactgtgttttagcgtgtttttctataaactctgttcttgctggggttttcttgtttgtgtcttctttatctttgttgaacttgaatcttggtatctttcaacttggatgtcactggtttccagacttgtatgtttggttatgcagctattgtttgatataaaggttcgcggatgaaacttgaaaataaaattgtcttcttttatttttagaatggttaatttgtgatgtgaatcttttatttttggtttctt

SEQ ID NO: 588 - DNA, 458 bp, Lilium asiatic
cccacgcgtccgcggacgcgtgggcgcgacagaaggagaagagagacacagggtaggatgagaaaaggttagggtgagaaatgagggaagataagagagaggagataggtaagacgagagagagagagagagaggagattaatgtgttgaggatttcaagatctcccagcgtattgggctgccccaggcaatattgagagttgtgttctgggagaggatgaggtttgcagtatctgtttcaatgttcaaaccaatgaaatgtgtggacctgtggtgggtctgcggcacaggcttcggatattgagacaggtttcagatatagagactgcgagaacacgtttggacgtgatgcaacacagttttggaggtttcatatactaatgttttgaaaagggtaacatagatagttttgaaaataatcaaacacttacgaacaaagtgacttcacaacttcagtc

SEQ ID NO: 589 - DNA, 221 bp, Lilium asiatic
gctgttctcgattgtgatatcgctgatgatgatgggccatgcaaatggcggcttggttgtgaatgtgaatgatccgtttggatttgtctgggatatagcttctgctgggaagggtggatgtcatgctgaagtcaaggtctgatgtagtttcttttttgaggatcatgtcgtctatatttgtaaggtttagtcgtgcattttgatctgctagctggtatatt

SEQ ID NO: 590 - DNA, 414 bp, Lilium asiatic
ggtgattttggatgtgaatgagccggagatgttggaattggatatgtcgacggagacgactcgggtgtttgcgcagtggacaccgacccacgaacaaactgtgttcggatgggcagtgtcccagctgcgaaatgccggggagttgaggccctcgcggagagaagccagagcagaggcatcaatgagtagattcggggctgcggggccgagaagggaggataggatgaggaggaggaggagcattgatggtgatgatcaggagaattgggtattgctgagtgtggggattgatgggttttggttttgcagttcctccatcgctccgccaccttcatctccggcgatggccgacgcttactggaaccgccagcagtccgtccaccattcgtcgccgatgccgatggcgaagcgccc

SEQ ID NO: 591 - DNA, 451 bp, Lilium asiatic
agccttcgcactctttcaacattacatgttttcaccactttgggaattactttgttggggccacatgtgcaaatttaaactactcagatgaaatggcttatattcatggaacacctatgaacccggtggctgtgaagattccaaattcgggcatgcagaaataccacgatatgtcatccaacataggttctggatttgtcattcatcattcaacttcggccaacttttatcagcattcactcacctatgcaaaacatggcatttaattcttatagccatcattcttagacaccattacctttctacttgcatatatttaacaatatgcacgcaaacaatgtatattctccaagggttgatgtaccttctgacttcagtttacagagctgctttaattccatatttgacccatacaatataccttttattcatgatgcttgttcagaaatta

SEQ ID NO: 592 - DNA, 454 bp, Lilium asiatic
ggcggactgtaaggagatacaggaagggagagcgtgttatgacccaaatacccttgatgcacacgcgagctacgccttcaacagctattatcagaagaaggggagggtggttggcacgtgcgattttgagggtgctggtttcgtggtctccgaggctccggtggttggcaagtgcgtcctgtctacaactgggacatgaatggacagaagataacatggagagtagagatgaagaaaacatgggagcatggaatgaatgcgagtgctgcagctatccttgactttagtggggttcacatgggagtctttactttttttttttgttgttgttgctactgttgtcttttatctggggttagatatttatgagtaagttgacatgtgagctgagctgggtggagaatcagcttggatcttgtgttgggtcttttttcgcactcggtaggtccttttg

SEQ ID NO: 593 - DNA, 435 bp, Lilium asiatic
agcacagaccagtcgaacaactcagttgtcccatctcctccttgtgatgataaccctagcaaaagacttcatcagcttccgaggaatgagccctcctccgtaaacccaccacagccgatccccatgactcctgaaaacaaacaaactggttggtgttacccctctgcaaatcactggttggttccggttatgtcgccttcagaaggactcatttacaagccatatacgggcccttgccctccagcttctggtttcatcgcccctgcttatggaggctccataccaatgagtctgcctcctgtagcctatgacgcctctccatcacaccaccaatctgctgttcccgttgcccctacaattgctccaaactattttccgatgccatacgggcttcctttcgtgaaccacaatgcctctgtgtctggtgaacgagcg

SEQ ID NO: 594 - DNA, 436 bp, Lilium asiatic
ggtcagccttcgcagccttccaacagtgcatgggtcgagcagtttgggaatcactttgttgacgccggatgttcaaattcaaactacgcagatcaaatggcttatatgcatggtacacctatgaacccgggggctgtggagattccaaatttgggcatgcagaaataccaggatatgtcatccaacagaggttctggatttgtcattcatcatccagctccgcccaacttttatcagcatccaccacctatgcaaaacatggcagttaatacttatagccatcattctcagacaccattaccttcctactcgcatatattcaacaatatgcacgcaaacaatgtatatcctccaagggttgatgtagcttcggactccagtttccagagctcctttaatcccatatctgaccgagtcaacataccttctatgcatg

SEQ ID NO: 595 - DNA, 477 bp, Lilium asiatic
  modified_base (383)..(383): a, c, g, t, unknown, or other
  modified_base (386)..(386): a, c, g, t, unknown, or other
gtttaactggttttgcagcaaaagcaagaagttatgttggtgttgatgtgggtcacaaatcggtagcgtaatcagtgtcatgttctgcagctaaacattaatcaagccaccagggagtatcttgagcgttatgttacaaagaaaagtgaacgagagaagcacaaagaaactgaaggccaagttggtgaagatgcaccaggctttcaaagccaacaacctcaagagtccgatgtcggtgtcgatgaatctgaggataaagaaaaccatgagaaggccaaacattttggtattgttacatatgaggatagagagacagacagatgcttctgagaagattgcaaatatgatcgaggagagaataaagaataaaccattcccacttncgncaactgtgcagactcctgtcaatggctccatgaaatcagtatcgcaggctccttccaagtcaagggatggtgattcagatgttgatataat

SEQ ID NO: 596 - DNA, 280 bp, Lilium asiatic
ccatggacttgtcaagttttgatttttctctggtttacagatcacagcttatgagcctactggggactgcttatatccacctttgtttctcaaattacgatgaaactatatcacttattatctgagaatgcaaatcatacccataagctgccctatgttttatatccaaacattgcaaataggctgtggtgacactttgtactaaatgctgtattgcaaatcatagcaaagagattgttctagatcctatcatctctgaataacatactatatacacaac

SEQ ID NO: 597 - DNA, 458 bp, Lilium asiatic
ctctgtatccatggacttggcaagttttgagatggttcgggactacagatcacagcttatcgacctactggaaactggtaatatcgacctttgtttcgcaaatgaggatgaagctagagcacttataagcggagaatgcaaagcagatccagaggctgccctaggttttctatccaaacattgcaaatgggctgtggtgacacttggtcctaaaggctgtattgcaaagcatggcaaagagattgttcgagttcctgccatcggtgaagaacatgctgtggacacaactggagctggcgatctctttgcgagcggttttctgtatggattggtgaaaggactttccttggaggactgttgcaaggtgggcgcttgcagcggtggttccgttatccgatcccttggcggtgaggtcagaaccgagaattggaagtggatgtataaccagatgaagattg

SEQ ID NO: 598 - DNA, 357 bp, Lilium asiatic
  modified_base (180)..(180): a, c, g, t, unknown, or other
gcagaaagggggctcactccctatgatataggaagcatcttgtgccgagttactctcaagaaggaatcgaagatcgaggagattatctatgaggcgaaagagtctgtcctcccaggtaccagtgaatctgcattccttgaggccgtctctgaaatcatggatcgtcatctcgatgaactntcccagtaggaattagatgtgatgggtatatgattatagctatgtgaagcacaaactttcaggtcagatgtatctattacaaatctttattggataacctttgtagactgtaatgtaagtatgttggttgttatcaagcagagtctttaacctggaatattagccggttaatgtgtg

SEQ ID NO: 599 - DNA, 159 bp, Lilium asiatic
cagcattgccggcgaatgaagcgatccgccgccgtggattgatctcgatccgatccgatggggtgcttctgcagcgtcccgcgcgtggaggtcagcagcagcagcagcagagtctgcggcagcctcgccgtccgccccgatctccacctgctctcaccg

SEQ ID NO: 600 - DNA, 431 bp, Lilium asiatic
ggaagattcagcagcagcaaaaagagcacttcttaaggaatcactgatggttgatgaaaatctaatagagatcacaactcctcgatctgcctccacctggcttaagccaaaagaagtcagaactattagcaattttgagtctgcacttgaaaagtacgatgagctcagaagcaagtatcaaaagcagctgtgcgaagtaaaagatgtttgctctgccgagtgtgctggtgaagaagggatatctatcagaaaacgtaagagagccttaccaagcaaaaatgaaagcgaggcattgagaaattgaagaggtatttatcaatgataccgaacttgggcattctgaaaaatgacaaacctctatttatatatctggcggtctctttagaggccatttcctcggtgcttatgaaagaagaagtgggtgtatagta

SEQ ID NO: 601 - DNA, 332 bp, Lilium asiatic
gtcgacttcaagataggatggcaggcggaaaagaagagtacaatgccttgtgctactccctagtatccacggatacacaggagatgtattattcaactaaaaggcagcaatttttgatagatcaaggttatagctttaagatcatcacaagcttgccgcctcctgattcagggcctgagttgagcctctaccaccttgatgagcaactagacctactgaacaaggtactgaatgcaggggatgttgaagctggattagagcaccttgaaaaagatgctgatgatatcacgctccacagagcccggcgttcttcagggtctatgagtgcgttt

SEQ ID NO: 602 - DNA, 343 bp, Lilium asiatic
caaatgtagtgtgaaaaaatctgtcattggtctccactgtattattggttcaaatgtcaagagtgttaactcggttgtgatgaatcatgtcactatcgaagatgggtgctttatccaagcatctgttgtctgcagcaatgtgcaacttcatgagcgcgtttctttgaaggattgccaggttggagctgggtatgttgttgcatcaggcagcgagtacaagtcagagtctcttgcgagaaaatagcgtccatctcttggtatcaaattgtagatgtttaagcattatgctgcttacagcctatgtttagtcgagttgattgatagcgaaatctcaaattattta

SEQ ID NO: 603 - DNA, 289 bp, Lilium asiatic
cggacgcgtgggtctcgatcagctccgacgagactcgcatctcccccgtcgtcgccgccgctcgatggctcctgtcgctcccaagaccggcgatgccgccttcgccgccatggagcgcgtgaatgcggagctgttcacactgacgtacggagcgatcgtgcggcagctcctgacggatctggaggaggttgacgtggtcaacaggcagctcgatcagatgggttataacattggaattcgattgattgatgaatttcttgcaaaatccaatatatcacgatgcgttgac

SEQ ID NO: 604 - DNA, 471 bp, Lilium asiatic
caaatgtagtgtgaaaaaatctgtcattggtcgccactgtagaattggttcaaatgtcaagattgttaactcagttgtgatgaatcatgtcactatcgaagatgggtgctttatccaagcatctgttgtctgcagcaatgtgcaacttcatgagcgcgtttctttgaaggattgccaggttggagctgggtatgttgttgcatcaggcagcgagtacaagtcagagtctcttgcgagaaaatagcgtccatctcttggtattaaattgtagatgtttaagcattatgctgcttccagcctatgtttagttgagttgagtgatagcgaaatctcaaattatttatcagaaactgcacaagcatcttccgagcaaaaaggtttgaatgagatggtgaagatgacctcagatctaatcttatattacccattctttcgagaggaagatgtaggaccatgttgtgaaaatgtctg

SEQ ID NO: 605 - DNA, 439 bp, Lilium asiatic
gattacttcggcaagtgagacacgtctatgggagcgccgactcttgcactgtgttcctgttcctggacaaaatttgtggactcttgaacctttccgctctcaagttttaagtaacatgcattgttctccttctcaaaatggagagaaacgtggaagagaagttctggaggagggtgaggggttgccatcttgcagcaaaaagcagaaggaaaatccggatacatgtcagatggcttgttcagaaaatgagttgattattccagactcgatggagtcacgcgatggttctcataagtttgataaaccacctttttcttgcttagtgaagacctatgatagtccagaatgtgactccaaactgaatgatgtttttgaagttattggcatctacacatttgacccacaacttgttcatgaggatgatagtgatgatcttatg

SEQ ID NO: 606 - DNA, 364 bp, Lilium asiatic
cgaacgcgtgggcggacgcgtgggttcagggaaggtgttgctccttccagataagtgatggaaacctcagtagctgatcaactatatacagtactgattagagactatgacgtgcgcccatggctgtaactgacatgcgactgctcatgaacccgtcactgtatatattttcaactttcaaatcatgaaatgatcaatgcaaatagctactgatctactagtttttacttgtgctaggtcatacctttataaattgactttattattgcgtgttctatattatgctgaatcatttattatacggaagtggatgttcaacatacatgatagtgaccattttaactgggaactctgaaatgcggac

SEQ ID NO: 607 - DNA, 405 bp, Lilium asiatic
ccttcaatgtcatcttcagagagtagggtcccggtggagtaattgcaggcaatgtttgggaggaggtgttaacttgcgttaagtttaattttaaaattgtttttggatcttttgtgtctgatatgtaaagtgtcctttgcatgcctgatctggggaacttttttgctttgttgtgaagtgttttattgtattttgcactgtatatcacctttcaattcaagagtcgtatcgtataaggccaatattctctaatgtcagagtcattagactcacgatgttgtataaggtccatgactgaatttctctttctgtatttgcatagtgcaatccatagttctgaattgcggtcgcggctgctatgatgcagattgcggcatgaaattattatatgattgcaccgaatgc

SEQ ID NO: 608 - DNA, 433 bp, Lilium asiatic
cttggctggacattacatgttacaaggtgccagctcatttttacctgtcatggctctcgctcctcaagaaaaggagcggattgttgatatagcggcagctccaggtggtaaaacaacatatatcgcagctcttatgaaaaatactggaatgatttatgcgaatgagttcaagccaaaacggattaagtcactatcagctaatatacataggatgggtgtgacaaatacaatagtatgcaactatgatggaaaggaactacccaaggtcctaggtcacaattctgttgatagagtgctgttggatgctccatgcagcggaactgggatcatttccaaggagtcggatgtcaaaacttccaagagtatcgaagatctgcagaactgtgctttccttcaaaagcaactgattttagcagcaattgacttggtggat

SEQ ID NO: 609 - DNA, 380 bp, Lilium asiatic
  modified_base (368)..(368): a, c, g, t, unknown, or other
caaagctcgaatctctcggattcagcccggcgatctcttcagatctgccagatcgtgcattggatctcggggttttgatacgtctggattcttcttgctaggcctcgccagatctatggtgggctgtcactgaagtatgatgcccgtactgactgtttctcactccggatctcatcatggacattgaaactaaaagcaagatgactccagctcaagatccattttacattgtcaaagaggaaattcaggaatcaattgataagctgcaagctacttaccatagatgggaacagaccccttcaaacactggagaacgtgttcatttaaccaaagagctccttgccaactgtgaaagcattgaatggcangtagatgagctg

SEQ ID NO: 610 - DNA, 386 bp, Lilium asiatic
ctctctagggttagggtttcccctcttgcagtgatctcgagaagccgatcaccatgagtaagttgcagagtgatgtgttgagggaggcaatcactcaggttactgctgatgccaaggagaagaatcgcaagttcacggaaactattgagcttcagattggtttgaaaaattatgatccgcagaaagataagcggttcagtggatctgtgaaattgccccatattccgaggcctaagatgaaggtctgcatgcttggtgatgctcaacatgttgaggaggcagagaaaatcggattagactatatggatgttgaaaggcttaagaagatgaacaaaaacaagaaactggtcaagaagcttgctaagaagtatcatgctttcttagca

SEQ ID NO: 611 - DNA, 332 bp, Lilium asiatic
  modified_base (7)..(7): a, c, g, t, unknown, or other
  modified_base (9)..(9): a, c, g, t, unknown, or other
  modified_base (12)..(12): a, c, g, t, unknown, or other
ccacgcntncgnaaaaaaaaaaaaccacacaaacaataataaccaataaaaaaaaaaaaatataaaaaaagggaataaataaaaacaaccagaacaaataaaaaatatttgtttacattgcctttctcttcttctaaattttttacttaatttccctctaccactaataactttgtcttttttcttcaaaaaacccctatattattttaactcatctttctacacaactcctccctttttttttaaaacccctttttttctaaaattttatatcctcttttatatatccccctttttccaacctccccgttatttatcaatttacccccttt

SEQ ID NO: 612 - DNA, 412 bp, Lilium asiatic
aaaccctacttctacttcccccctttgctctcaaaccttatcacctaatccttatccgcccaaaccagaaaaccatgtctacctccgcagcttccctcgcactcccaaccctcactctccgaacccgacaacctctatgttctccccaatgcttctcctcgtccctctccctcacacccaacaacaaacccatttccatttctgctgtttttctcaaaccaacaactctgtcgtcgtctcgcttcgttccccacgtcgtggtgtcgtcggatttggggcaggaggaggacaccttcagtgacggagacggccccagcttctcccccgaccttaagctctttgtcgggaatcttccgttcaacgtcgacagcgcgcagctcgcggagctctttgagagtgccgggaatgtgga

SEQ ID NO: 613 - DNA, 137 bp, Lilium asiatic
  modified_base (9)..(9): a, c, g, t, unknown, or other
ccacgcgtncgaaaaaaaaaaaaaaaaaacaaaaaaacaaacaaaaaaaaaaaaaacaaaaaaacaagaagggaaccaacaccagaacaaagggaaaaaaacacccgccggaagcaaaaaaaaaaaccaaaaacccc

SEQ ID NO: 614 - DNA, 334 bp, Lilium asiatic
aaacttttcttctactatcccccttttctttcaaaccgtatcacccaatccctatgcgcgcaaaccaaaaaaccatgtctacctccggatatttccttgcactcccaacccttacttttcgaacccgacaacctctatgttctccccaatgcttcttcttgttcctttcccttacacccaacaacaaacccatttccatttctgctggttttctcaaaccaacaactctttcgtcgtctcgcttctttccccacatcgatggtgtcctccgattttgggcaagaagaggacacctctattgaccgaaaccgccccaacttttcccccaacctta

SEQ ID NO: 615 - DNA, 422 bp, Lilium asiatic
  modified_base (350)..(350): a, c, g, t, unknown, or other
cccacgcgtccgcccacgcgtccgatcctactggtattgatccaacacctgaacagtgggaaaaaatagctgatttaattgaagaaaagaaccacattcccttttttgatgttgcttaccaggggtttgctagtggaagccttgatgaagatgcagcttctgtgagactgtttgtggcacgtggcatcgaggttcttgtagctcaatcttacagtaaaaatctcggtctctatgctgaaaggattggagcaatcaatgtgatttcatcgtcaccagaatctgcagcaagggtaaagagccagttgaaaaggattgcccgaccaatgtactctaatccaccggtacacggngctaggatagttgccgatgttgttggaaacccagttctctttaatgaatggaaagcagagatggaaatgatg

SEQ ID NO: 616 - DNA, 269 bp, Lilium asiatic
aaaattttgtacagaaacaacgatttcttccaagggcaaacacttgcaatggcatattagcacagggtcatgaaaggatatctaaatgacccagagctacagagagaactgtacacaaagaaggatggttacacacaggagatattggtttcattgatgatgaagatgaactcttcattgttgatcgggtaaaggaattgatcaaatacaaaggattccaagtggctcctgctgagcttgaaacattgttgattgcccacccaaacatt

SEQ ID NO: 617 - DNA, 372 bp, Lilium asiatic
atcgagcttcagcaatggtgtacgtcaaggctcagaaatcaaaagcctacttcaagagatatcaagtcaagttcaagagaagaagagagggaaaaaccgattaccgtgccaggattcggttgattaatcaggacaagaacaaatataacactccgaaataccgatttgtggttcgctttagcaacaaggacattgttgcacaaataatatctgctagcattgccggcgatttagttcttgctacagcatattcacatgagctgccacgatatggtcttgaagtaggacttacaaattatgcaacagcttattgcactggtctcctgttggcccgaagagtcctcaaaacacttgaaatggatgaggagtatg

SEQ ID NO: 618 - DNA, 447 bp, Lilium asiatic
acaagaacaggaggacggcagcggcgggagatggcgagagatagctgcctttctcaggtcaccgccggcgccgccatcggcggcgccgtgggcggcgcattcggtgctgtgtggggtactattaatttggctacggagaagatgccaggactactaaagatcagatacattgggcaaactactcttaaaactggtgggctctttggaatcgttttggcggctggatgcctagtacggtgtggcaggtcttattgagttccatggctactgtttcaaagcttggttagtgttcttctgttgatgctactcatttaaagtgagtttaatgcacctgtgtgtctttgaggttcgtttcctgtttggtatttcagaaataagtatatctgtggtaactaacagtgacaaattagttgtctggcaaaatactcctatagtttagggatgcgt

SEQ ID NO: 619 - DNA, 443 bp, Lilium asiatic
  modified_base (32)..(32): a, c, g, t, unknown, or other
ccggttcggaataaccttcgcgacccacgcgnccggatattggtagggtggtgaaaccaggcaattacagactggtgagaccatatcctaggcgtgcttttagtgatggagaaagtgctgcgacattggatgaacttggcctaaccaacaagcaagaagctttgtttttagagttaatctgatgccttgatgcagtttgctacaaaacaagctattgaagtttttagtttattaaaattaaaatatgaatcacaatacacagacggatgtggcattttagttttaatctgggtttctactgtttgggtgatgcaatttataaatttacagatctataagatcaacatacagtaccgtcagagctttacttgtgatgactaaatcgttatggcgaatgttttgtatattttgcggtaggattgaaataattcatgattattgat

SEQ ID NO: 620 - DNA, 357 bp, Lilium asiatic
gcagaaagggggctcactccctatgatataggaagcatcttgtgccgagttactctcaagaaggaatcgaagatcgaggagattatctatgaggcgaaagagtctgtcctcccaggtaccagtgaatctgcattccttgaggccgtctctgaaatcatggatcgtcatctcgatgaactttcccagtaggaattagatgtgatggttatatgattatagctatgtgaagcacaaactttcagttcagatgtatctataacaattctttcatggataagctttgtagactgtaatgtaagtatgtttgttgttatcagtcaagtactatgagcttggaatatagtctgcttatgttgt

SEQ ID NO: 621 - DNA, 423 bp, Lilium asiatic
cccagaagaccgtcgtcctcccggcgcaccgccgcggctgccatctcgtcacctccaagattgagagggaaatcaagcaagatttatcgggatttaaatgtggcttggctcatctatttctgcagcatacaagtgcttcattgaccattaatgagaactatgactcagatgttcagtatgacacggagaccttcctcaaccgcattgttcccgaggggccttcagcgccttggaagcatacactagaaggtcccgatgacatgccggcccatatcaaatcatctatgtttggctgtaccctgacgattccaatttctgatggtcgtctcaatatggggcaatggcagggtatctggctgtgtgagcatcgggaccaggctacacctcgcaaaattgtggttactcttaatggtgtatgaactg

SEQ ID NO: 622 - DNA, 343 bp, Lilium asiatic
cccagaagaccgtcgacctcccatcgcacctgcacggctgccatctcatcacctcgaagagggagatggaaatcaagcgagatttatcgctatttaaatgtagcttggctcatctatttctgcagcatacaagtgcttcattgaccattaatgagaactatgactcagatgttcagtatgacacggagaccttcctcaaccgcattgttcccgatgagccttcatcgccttcgaagcatacactagaaggtcccgatgacatgccgtcccatatcaaatcatctatgcttggctgtaccctgacgattccaatttctgatagtcgtctcaatattgggcaatg

SEQ ID NO: 623 - DNA, 433 bp, Lilium asiatic
gatcgagataactagaaacagtgtgatgaaaatgaaggtccttgttttcttcgttgctgcaattttggtagcatggcaatgccatgcgtacgatatgttccctctccgaatgaacactggctatggtgcccgtactccggaggtgaaatgcgcaagttggaggcttgctgtggaagcacacaacatctttggctttgagaccattcctgaagagtgcgttgaagcaacaaaggaatacatccatggcgaacaatatagatcagactccaaaacagttaaccaacaagcttacttttatgccagagacctcgaagtccatcccaaggacacatttgtgttcagtatagatggcaccgtactctctaatattccatactacaaaaaacatggatatggggtggagaaatttaactcgaccttgtatgatgaatgg

SEQ ID NO: 624 - DNA, 415 bp, Lilium asiatic
  modified_base (9)..(9): a, c, g, t, unknown, or other
  modified_base (16)..(16): a, c, g, t, unknown, or other
  modified_base (20)..(20): a, c, g, t, unknown, or other
  modified_base (42)..(42): a, c, g, t, unknown, or other
  modified_base (44)..(44): a, c, g, t, unknown, or other
cccacgcgnccggcgngggncaccctatgcacaaactgcggngncctcactatcgggggaccatgaacattaattcacttgcccgcaaatccttggtcaatgccgacggtattatagagaaaacattcttgtggggtaggtactctttggaaatgtctgctgttatttacaaggattgggttttcaccgatcaagcattgcctaatgatcttgtcaagagaggagttgctgttaaggatccatctgctccccatggagttcgacttttgatcgaggactatccttatgcttctgatgggctagagatatgggatgctatcaagtcttgggtggaagaatatgtctcattctactacaagtcagatgaggaacttcaaaaagaccccgagctccaagcttggtggaaagaacttgg

SEQ ID NO: 625 - DNA, 348 bp, Lilium asiatic
ccacgcttgcgatagttcatttttcttatatttaagtattttgaatttttgggaggatggttttgcggtcatccttccacttgctgaggactttgtaggtaggaatgatataattttgcatgttaggttctctacatgccaattgtcaaacgggaacacatttgttttcttgtctgtgcataagcaccgacacatatgcaatgcctagattgagatcatttatataaaaaaaaaaaaaaaaaaaaaaaaaaaaaactggtgaggaaccatatgataaaaatggaattctactttttagggaaaacaattcataaatctacagaatgcctaaaataaaaaaaatgctac

SEQ ID NO: 626 - DNA, 433 bp, Lilium asiatic
ccacgcgtgcgactcactccatctcagtctcatcactctccaaccacaatggctgtcttgggcggcgccgcctccgctcgcatcattcgctccgtctcactctccacctcttctcgctccttcttctccttatcatcctcttccaaactcaaatgcttgcgctcctctcctcgcatttcgcacctctttctcaatcagcaaagagcggaggttcgcgtttcgagtggaggatacagaacggtatcggcgccgaagtccgttgcgtctgatcctgatcagttgaagagcgctagagaagacatcaaggagcttctcaactccaagttctgccatcctattctcattcgtttgggatggcatgatgctggtacatataataagaatattgaggagtggccactgataggtggagctaatggtagcttaagatttg

SEQ ID NO: 627 - DNA, 413 bp, Lilium asiatic
  modified_base (2)..(2): a, c, g, t, unknown, or other
gnctttgcacacaacattgagacagttgaagagcttcagagtgttgtacgggatcatggtgctaattttaagcagtcattagatgttctaatgatggccaaggaaaatgctcctgctggaacacttactaagacttcaataatgttaggttgtggggaaacacctgatcaggttgtgaagacaatggagaaggtgagagcagctggtgttgacgtgatgacatttggtcagtatatgagaccttcaaagcgccatatgccggtatctgaatatgttacaccagaggcctttgataagtatcagaaacttggcatggaaatgggctttcgatatgtggcatctgggcccatggtgaggtcatcatacaaggcaggtgaattctatattaaatccatgattgaatcagatcgggc

SEQ ID NO: 628 - DNA, 250 bp, Lilium asiatic
cccccaaaacacccgacctccccgttcactctcccggcttgcaattcgtcacccggcaggattataaggaaatcttgcccgagttatctcgatttaaaagaggctttgctcaactatttctgccacataccaatgccctattgaccccttattagaacctttactcacatatttcatcttacaccgagacccttctctaacccatttttccccaaggggccttaactcccttgaagccttcaccttaaag

SEQ ID NO: 629 - DNA, 407 bp, Lilium asiatic
cccacgcgtccgaggcaattgcagagacaactgctccactgactcccatggaggaacggcttgcaaagataccttctcaacgtccttacatttcttcacccaagaaaccagatattgcagctgtcagtgttccagatccccctgctaatgttgtgactgtggaacctaaagttgccactcaacaagaaactgcacaacctaaaccagtggcaaaacaaccactttctccttatatcgtttatgatgatttgaagccaccatcatctccttctccatctcagcctggtggtgggaaaccaacaaagatcagtgagacagtgccaaaaccaagtgcttcagatactccaagtagtgtgccaggagtagatggcatctctcagacaacatcgtcatctaaagtggagaag

SEQ ID NO: 630 - DNA, 374 bp, Lilium asiatic
cccacgcgtccgcccacgcgtccgcggacgcgtgggctagttagaagagttctcgcaagaagcggactttcgttaaatgatcggcttcccggaagtaacagcaatccagtcacattaggcgaagccctaatggcgccaactgtcatctacgtcaaacaggttcttaaaataattagcaagggcggcgtgaaaggaatagcccacatcacaggtggtggtttcacggacaacattcccagagtctttccttctggcctcggagctaaaatctatccaaattcttgggaaatccctccgatattcagatggatacaagaggcgggaggaatcgaggatgcggagatgaagcggacgttcaatatgggcatcgggat

SEQ ID NO: 631 - DNA, 394 bp, Lilium asiatic
  modified_base (332)..(333): a, c, g, t, unknown, or other
catcctcaattctctcagatctctcactaatggcgcccaaggccgagaagaagcccgcggcggagaagaagccggccgtcgaggaggagaagaaggcggttccggcggagaagaagcctgctgagaagaagccgagggccgggaagaaggtcccggcctccaaggagggggcctctgacaagaagaagaagaggtcgaagaagtcggtggagacctacaagatctacatcttcaaggtgttgaagcaggtccaccctgacatcgggatctccagcaaggcaatggggatcatgaacagcttcatcaatgatctctttgagaagatggctcanngagtccgccgccttgctcgctacaacaagaagaacaccatcacctctcgggagattcagac

SEQ ID NO: 632 - DNA, 433 bp, Lilium asiatic
cggacgcgtgggctgtttctcgtcgagccctcgaccagaatcaacagtgaagacaaagctaaagctcgcccaacgtcacatgccaatagcgagcaagctacaaaaacgagtccaacatcagagcctaaggcggtcccatcatctgaggcaccaggccagaacaacttgaacatgcaacaccagaaggcaaattctgaggcgacaggaccgagtgttacatctggcggggagaagacatcgctgtcagaagctgcgagcgaatctgaccggccgccttctccttcgcctccagtgagccgacctgcatttgaggataatattgtccttggcgtggcacttgagggatcgaaacggatgcttccaatcgaggaggggatggacacaatgcctacaacgggggaggccagtgaattgggtgctggtcgtaacggga

SEQ ID NO: 633 - DNA, 235 bp, Lilium asiatic
  modified_base (9)..(9): a, c, g, t, unknown, or other
  modified_base (21)..(21): a, c, g, t, unknown, or other
ccacgcgtncgcccacgcgtncgcccacgcgtccgcttagctttttgttagctgtaacgggagttctatggctaatggttgatgaaagcgggattcatgagtaaggaaatacaattgccagtatgtgctgctgactttcaaccatcgtgagaactaagaaccctgtactcaatgcttgtgggttgaacggggattttcaattcaatccacagcggacaatttgaagtttttcttt

SEQ ID NO: 634 - DNA, 306 bp, Lilium asiatic
  modified_base (275)..(275): a, c, g, t, unknown, or other
gcgcaattgggagcatatacgacacagttcccaactcattattatgcattagcaattcttgcaataaattcaaacctgcatatttacttgctgacggaagattagagagggcagggagggctaaaaggccatctacttcaactggtggacaaattcctgcagagagcaatggcctgactagccaggattcatataaaaacagcatgctcacagcatcaatcattgctgtgggagatgagattctctcaggtttggcaatcttgaggatctgttgngaccttatttgtgtaggaaactgcattcaat

SEQ ID NO: 635 - DNA, 407 bp, Lilium asiatic
cggacgcgtgggtcatcttctccctcttgaatcagcgtcactcactttctctctagctgcattttgtacctacgttctgctgaaatggaaaattaaatataattaatattattatattgatcgatagaaacaggctgacatatttaagcgtagatcggcatcgtggtgctgtatccacttgtcaatcgcaaattcggaaaccctagctagctagctagcagcagcagcagatctgatctcacgttcgttcgtggttatggcgccaaggaaacctcgcgagcgtgaaatgctgctcgagtccgttatcgcgctcatcttcatcttcgtcgcctgcgtcgacctctgcgacggcgccaccgtcgtcgacgtctaccgcctcatccagtacgacatgtccggagtcccct

SEQ ID NO: 636 - DNA, 446 bp, Lilium asiatic
  modified_base (9)..(9): a, c, g, t, unknown, or other
ccacgcgtncggcttcaccttctgctctagaaaattcagtgctgaaacatggcttcggctactctctctgtagccaaaccagcccttcaggcaaatgggaaaggcttctctgaattctctggcctccgaagctcatcaggcttccttcccttttctagaaaatcttcagaggatttccattctgtcattgccttccagacctatgcagttggaagcagtggaggatacaagaagggtgtgacagaagcaaaactgaaggttgccataaacgggtttggaaggattggaaggaacttcttgaggtgctggcacggtcgcaaagactcccctcttgatgtcattgccatcaacgacaccggcggcgtgaaacaagcctctcaccttctcaaatacgattccatcctcggaaccttcgatgctgatgtcaagcctgttggcagcaatgt

SEQ ID NO: 637 - DNA, 423 bp, Lilium asiatic
  modified_base (385)..(385): a, c, g, t, unknown, or other
ggtgtgggtgtttgaatctggtgaaggatgtcaattggtccaatcaaccagggtgatgccaacggctccaaccccttcgcttcgtggggtcaattcgtggattttcctctccctccttccatcttcggcttcttccccggcttggaattcggattcggattcggatcatccgtgaacacacgtgtggactggagggagactcccagagcgcacgtgtggaagctggtgcttcccggcttcttcaacgaggacatgctggttgagctccaagacgagagggtgctccaagtcagcgtggagagcggcaacttcgtcacgaggtttaaggtccccgacaacggtaacctacaacaactcaaagccaacatgcgtcacggggttctcngtgtcactgttcccaagtttcatcaacccactactact

SEQ ID NO: 638 - DNA, 300 bp, Lilium asiatic
tccacgcagcctgctcttactaccattcaagtgtggagaaatatggcaggcatcggcgtcggtacccaccactacatcaatgactcacgcacgccatgagctgcaacgagcccgaggggcctaagcctctaccgactcttggattgacaacgacgcgccacagcagggagagcgaggagccacacgccagaaccgacttgaagctggtcatacctaaggatgcgggcatcctcgatagcaactacaactagctcaaccatgtcacgcccaggaaccatggctttggctgatgagagactc

SEQ ID NO: 639 - DNA, 433 bp, Lilium asiatic
ccacgcgtccgcgacaaggtgtacaacgcgctcggtgagaaggagaagaggtttcaaatcttcaagcacgatctgcgcattatcgatgaacgaaactctctgaaccgaacctacaagttgggactcaacgtgttcgctgatctcaccaatgcggagtacagagccatgtacctgcgaaccttggacgagggtccgaggttgggcttggatacgccgccaagaaaccactacgtgccacgtgttggagataacatacccgaatccgttgattggaggaaggaaggtgctgttaccccagccaaaatgcaaggatatacttgtgatagctgttgggcattcgtagcagttggtgcagtggaatcactagtgaagataaaaacaggaaatctatattcattatcagaacaagagttggtggattgggttacatcgt

SEQ ID NO: 640 - DNA, 448 bp, Lilium asiatic
cattcccccagcagccgagagaggatagagcagcaatggtgcagcgcctgacctagcgggggcgccacagctatgccaccaagtcgaatcagacaagggtcgtcaagaccccaggtgggaagctggtgtaccagaacactaacaagagggctagcggaccgaagtgtccggtgactgggaagaggattcaggggattcctcacctgaggcctactcagtacaagaggtctaggttggctaggaatcggaggactgtgaatcgtgcttatggaggggtgctctctggcagtgctgtgagggaaaggattattcgtgcttttcttctcgaggagcagaagattgtgaagaaagtcttgaagatccagaagactaaagagaagaccaccaaaagttaagtatgagagttgaagctgaatgtttattttttttctagctcatgagggatttt

SEQ ID NO: 641 - DNA, 374 bp, Lilium asiatic
gtccagatttgattttgacagggcataaagaaaatgcagaatttgctcttggcatgtgcccggcagaaccctatgtcctctctggaggtaaggacaagttagttgtcttgtggagcattcacgatcatatctctgcattaggagaggccaccaaatctcctgcggcttcatctggcgcatctggaggtaagcagtcagcaaaagctggaagtgacaaaacttctgagagccccaaagttgcagcacggggtgtttttcaagggcattctgataccgtcgaagatgtgcagtttgctccctctagttcacaggaattttgtagcgtaggtgatgatgcttgtgttattctttgggatgctcgtgtaggctcaagc

SEQ ID NO: 642 - DNA, 365 bp, Lilium asiatic
ccacgcgtccgcgcagagtagagcagcagagaagagagaaaacggcactgcagccgtagaaggaaaaccgaccatggtgcacgtctccttttacaggaactatggtaagacgtttaagaagccccgccgtccgtacgagaaggagcgtctagacgcggagctgaagctggtgggggagtacgggctgcggtgcaagagggagctgtggagggtgcagtacgcgctcagccgcatccgcaacaacgcgcggaatctccttaccctcgacgagaagaacccgcgccggatcttcgagggcgaagctcttctccgcagaatgttccggtacggactcctcgacgagactcagaacaagctcgattacg

SEQ ID NO: 643 - DNA, 253 bp, Lilium asiatic
gatcgagataactagaaacagtgtgatgaaaatgaaggtccttgttttcttcgttgctacaattttggtagcatggcaatgccatgcgtacgatatgttccctttccaaaggaccactggttttggggcccgtcctccggaggggaaatgcccaagttgaaggcttgttgtggaagcacacaacatctttggctttgagaccattcctgaagagtgcgttgaagcaacaaaggaatacatccatggcgaacaa

SEQ ID NO: 644 - DNA, 267 bp, Lilium asiatic
cccacgcgtgcgatttcgaactccgccatggctgccggcaccgccaccggcacgtcagacttttttggcacccgcctgaacaacccgacaaccttaaacaacggaagattccacgcgctcctcaacttcggcaaaaagaaggcggcggccccgccaccgaagaaaaaggaagggaaagtgaaaccctccggcgaccggctggggtggtttcctaatgcggagccgccggagtggctcgacggaagcatgatcggcgaccgcgggttc

SEQ ID NO: 645 - DNA, 359 bp, Lilium asiatic
  modified_base (9)..(9): a, c, g, t, unknown, or other
  modified_base (14)..(14): a, c, g, t, unknown, or other
  modified_base (55)..(55): a, c, g, t, unknown, or other
cccacgcgnccgancttccttggcactgcccgagaggggccgccatggccaccgncagcacccaagcctacgccgcaattttccggccatgtacctcgaaatcgaggtttttgaccggctcttccggtaaacttaaccgggaagtgactatgcggccaatggggtgccctccttctgcctctttcaaggttgaagccaagaagggagagtggttacctggcttggcctccccaacttacctcaatggcactcttcctggtgacaatggatttgaccctctggggctagctgaggacccagagaacttgaagtggtacgttcaagccgagcttgtgaatggacgttgggccatgttgggt

SEQ ID NO: 646 - DNA, 405 bp, Lilium asiatic
aaaatcatgtaccatgcaattccccaatggcaaagatgacctgatgaactttgaagttgtcaattcgacctgatgatggatattacttaggtggcacatttttgttttcctttcaagtgtctcccatctatccacatgaagcaccaaaggttaaatgcaagacaaaggtctatcatccaaatattgacttggaaggaaatgtttgtctcaacatcttacgagaagattggaaacctgtccttaatataaacactgtcatctatggcttgtatcatctcttcacggaaccaaattacgaggatccactgaatcatgatgctgctgctgtgttgagagagaaccctaagatgtttgaatctaatgtgaggagggcaatggctggagggtatgtggggcaaacctttt

SEQ ID NO: 647 - DNA, 436 bp, Lilium asiatic
cattcccccagcagccgagagaggagagagcagcaatggtgcagcgcctgacctaccggaagcgccacagctatgccaccaagtcgaatcagacaagggtcgtcaagaccccaggtgggaagctggtgtaccagaacactaacaagagggctagcggaccgaagtgtccggtgactgggaagaggattcaggggattcctcacctgaggcctactcagtacaagaggtctaggttggctaggaatcggaggactgtgaatcgtgcttatggaggggtgctctctggcagtgctgtgagggaaaggattattcgtgcttttcttctcgaggagcagaagattgtgaagaaagtcttgaagatccagaagactaaagagaagaccaccaaaagttaagtatgagagttgaagctgaatgtttattttttttctagctc

SEQ ID NO: 648 - DNA, 206 bp, Lilium asiatic
aaggaaattaatgttcatttgaatattcttcacaatggcctctttcaaaatgagagggagacaacattattagttgcttttgtaggaggccattgtgaagaatattcaaaggaaattaatgttcatttttatttgatgttatatatctgtgcccttctgatttttgacaattcaaacttggatgaggtttgtttcttaagtcttaa

SEQ ID NO: 649 - DNA, 351 bp, Lilium asiatic
gcagcaaccgccggtcggagttccgccgccgcaaggttatccggcggaggggtaccgagaggagggatatccaccgccgggatacccgccagcgggatacccgccagccggatacccaccgccgggatatccgccacaacaagggtatcctccgccgacctacccggcgcaagggtatcctccggcctacgctcctcaatacgctcagactacgcccgcgcaacaaaatataactggccctggttgtttggaaggctgtttggctgatctctgctgctgctgactattggatgcgtgcttctgagatgagatgacaaatgcaaattggaatgagacggaatcaactcaata

SEQ ID NO: 650 - DNA, 431 bp, Lilium asiatic
ctatcctctgctcacgagtgcactagttcgttctagaaggctctattatcatcagatggaaccccccctatctctattttagggtttttattatcttcatttcatcgtttcgttacgttctgcttcgcgtggaccaacaagaagtgtaagttttcattcaatggccagcgctcagctctcagcaatatcttcgtcgatctctacggcgtcgtttgaagggcttcgaccttcggctgttcagtttgcttccgcgggcagaattagaattggcaatctctcccaaaggtctttccggggcttggttgtcaaagccgccaccgttgttgcccccaaatacaccgcgattaagcctctgggagacagagtgctgataaaaattaaggaagcagaggagaaaactgagggtgggattttgcttccatcaactgctc

SEQ ID NO: 651 - DNA, 209 bp, Lilium asiatic
cttagttgtaagtatttataggtttgctttttcaaatggttgtaaggaagttaggactgtagaaaactaaagtttaatataagaattcatattttgttccataataagttccaaaaaaaaaaaaaaaaaaaaaaaaaaaaaaaaaaaaaaaaaaaaaaaaaataaaaaaaataagggcgggcgaaaccaaggctccgtgtttatgcaca

SEQ ID NO: 652 - DNA, 416 bp, Lilium asiatic
caatattattctcctcattccttcatttttaaacctagctccatctccctccactcaccataacatggcatcagaagcaaatgctgccaacaccaacttctgtgtaaatgttagcaacaatggctacattagtgctaatgaccccttgaactggggtgcggcggcggaggctatggctgggagccacctcgacgaggtcaagcgcatgctagaggagtaccggaggcccgtcgtcaagctcggtggagagaccctgaccatctcgcaggtcgcggcgatcgcggcccacgaccagggggtgaaggtggagctggcggagtcctccagggccggtgttaaagccagcagtgactgggtgatggagagcatgaacaagggcactgacagctacggcgtcaccaccgggttcggtgcta

SEQ ID NO: 653 - DNA, 320 bp, Lilium asiatic
cccacgcgtccggagaattagggtcacgagggcttcatcctgcggcatcagacatgggaggaggcaatgggcaaaaggcaaagatggctcgcgagaagaacatcgagaagcagaaggccgcctcaaagggaagccagctggattcaaacaagaaagcaatgtcgatccagtgcaaggtgtgcatgcaaacatttatgtgcaccacatcggaagtgaagtgtagggagcatgctgaagccaaacaccctaaatctgatgtttatgcttgttttcctcatctcaaaaagtgaacatattggagagtgcaaatggagaaaaac

SEQ ID NO: 654 - DNA, 416 bp, Lilium asiatic
  modified_base (337)..(337): a, c, g, t, unknown, or other
gagagagagagagtaacggcgtgcgtgaggaaatgaacggggagttaagaaggagtgttgttgtgcgtacgtgttaggtacgaaaagcgaagggtcatttgcaccatctgtctggtgtctacctccacccttcttctcattatttttgtgtataaatatatccattttcatctaacacatcacaaaccaaacaactactactactactgcacacactatttcgctctctctctcattgtatggccgccaattcgagtagccgagggatcaccgccttggggaagcgagtcgccaaccagatctggacttccaaccccccctcagctcctctcacttncaggaggggagcaatagcaactgcctacagtagcagcggcgggtcagtgtatgacaagaaccctgatgatcagatccac

SEQ ID NO: 655 - DNA, 361 bp, Lilium asiatic
cttggttgcagcttcagcagcagcggcaagcaactccatccgcaatgggaatcgatttgaaggcaggaggtaagtccaagaagaccaaacgtacagcccccaaatccaatgatatttacctcaagctcctcgtcaagctgtaccgttttcttgttcggaggactggtagtaacttcaatgccgtcatcctcaaacgccttttcatgagcaaggtcaacaagcccccgctatccctctctagattgattcgttacaccaagggaaaggaggataagatagctgtggtagtcggggccgtgaccgatgacattagggtgtatgaagtccctgctctgaaggtaactgccctgaggttcactga

SEQ ID NO: 656 - DNA, 324 bp, Lilium asiatic
atttgatatcgtcagggcatcatataagcgaaattgctcttgcatgtcggttcagaacccttatgctctctgtaagcatgacaagtcagatgtcttgtggagcattcacgatcatatctctgcattatgagaggccaccaaatcttctgcggcttcatctggcgcatctggaggtgagcactcagcaaaagctggaagtgacaaaacttctgagagccccaaagttgcagcaccgggtgtttttcaagggcattttgatacccccgaatatgtgcactttgctccctctagttcacaggaattttgtaacgcatgtgataatac

SEQ ID NO: 657 - DNA, 391 bp, Lilium asiatic
gttgttatcattttcttacttttctttcacgctctgccacaaaactccgtctccgcagtaacggaataaaaaaacaggtttaattactattatggcgccgagggatcataagacaagcaacgctaaggctaacggtaacggtaacagcggggtgaaggaggtgcattttcgtggagtgagaaagaggccgtgggggagatacgccgcggagatcagagatcccggcaagaagagccgcgtctggctcggaaccttcgacacggcggaggaggcagcgcgtgcctacgacgccgcagcacgagagtttcgcggccctaaggccaagacaaacttccctctccctttggaaaatgttaagaactcgagccccagccagagcagcaccgtcgag

SEQ ID NO: 658 - DNA, 252 bp, Lilium asiatic
gctggacagggctagtgaggaatctctgtttttgctcggtctcaaagtccttgatacttcgatggatagctatgctacaggagcgtgtcatgcttccagcactgcttgtaatgaacgctccactctgattcataagctctataactctgctgcaaaccttgccgatatcattcaacacagcattcttactgagaaatccagttctatagccccatctattataaatagaggaaagtcttttacctccaaatg

SEQ ID NO: 659 - DNA, 393 bp, Lilium asiatic
cttgtttatcattttcttacttttctctcacgctctgccacaaaactccgtctccgcgataacggaataaaaaaacaagtttaattactattatggcgccgagggatcataagacaagcaacgctaaggctaacggtaacggtaacagcggggtgaaggaggtgcattttcgtggagtgagaaagaggccgtgggggagatacgccgcggagatcagagatcccggcaagaagagccgcgtctggctcggaaccttcgacacggcggaggaggcagcgcgtgcctacgacgccgcagcacgagagtttcgcggccctaaggccaagacaaacttccctctccctttggaaaatgttaagaactcgagccccagccagagcagcaccgtcgagt

SEQ ID NO: 660 - DNA, 435 bp, Lilium asiatic
cccacgcgtccgcccacgcgtccgcatccatagacatggccaccgtcacttctgcagccgttgctattccctcattcactggcctcaaggcaagcgcaggcaaagtgagtgccgcagttaaagtctcagctccccaagccacaaggttgggcatcaaggcttcgctgaaagacgttggagtcgctgttgtggccactgccgcgagtgcagtgctggctagcaacgccatggccattgaagtgttgctgggtggtgatgacgggtctctggctttcgttcccaacaatttctccgtggcctctggggagaagatcgtgttcaagaacaacgcaggtttcccccacaacgttgtgttcgacgaggacgagattcctagcggcgtggatgcagggaaaatcttcatgagcgatgaagaccttctcaatgcgcctgggg

SEQ ID NO: 661 - DNA, 149 bp, Lilium asiatic
gcccgtgaggaccttgcagcccttgagaaggattatgaagaagtgggtgctgagtctggtgagggccaggaagaggatgaagactactagaatctacttcagattcttgttcttggggcctgtttccggtggggttggaggtcaaaagg

SEQ ID NO: 662 - DNA, 417 bp, Lilium asiatic
cccacgcgtccgcccacgcgtccgcatcctttctgatctgtgctgttttttcagggtacaacaaaattgggtgctttcggttaaactgtgatgtctccgccagtgctgagcataggggaggaggagggtaaaagcaatgtcactttgttggtttcctcatcaaccaccatggaaagtgtgtgtctcaagagcttagaatttaaagagcgcaactacatgggattatctgattgttcttctgtggacagctcggttccgtccttctctgaagagactaaaagtaatctgaacctgaaagccactgaactcaggctcgggcttccaggatcacagtctcctgatagagattctgatctttgcttaagaagctcaactcattttgatgaaaaaactttgtttccgttgcgtcctttgact

SEQ ID NO: 663 - DNA, 126 bp, Lilium asiatic
cttagagccttatatgagcaagaggacaattgatatgcactggggtgaatatcatcagaattttatagaaggtttgaacaaacagctggagaaggatgatatactgtatggttacactttggatga

SEQ ID NO: 664 - DNA, 305 bp, Lilium asiatic
  modified_base (9)..(9): a, c, g, t, unknown, or other
  modified_base (16)..(16): a, c, g, t, unknown, or other
  modified_base (18)..(18): a, c, g, t, unknown, or other
  modified_base (20)..(23): a, c, g, t, unknown, or other
  modified_base (48)..(48): a, c, g, t, unknown, or other
  modified_base (51)..(51): a, c, g, t, unknown, or other
  modified_base (54)..(54): a, c, g, t, unknown, or other
  modified_base (64)..(64): a, c, g, t, unknown, or other
  modified_base (82)..(83): a, c, g, t, unknown, or other
  modified_base (86)..(86): a, c, g, t, unknown, or other
  modified_base (88)..(88): a, c, g, t, unknown, or other
  modified_base (91)..(91): a, c, g, t, unknown, or other
  modified_base (95)..(95): a, c, g, t, unknown, or other
  modified_base (98)..(98): a, c, g, t, unknown, or other
  modified_base (106)..(107): a, c, g, t, unknown, or other
  modified_base (115)..(115): a, c, g, t, unknown, or other
  modified_base (124)..(124): a, c, g, t, unknown, or other
  modified_base (133)..(133): a, c, g, t, unknown, or other
  modified_base (135)..(135): a, c, g, t, unknown, or other
  modified_base (142)..(142): a, c, g, t, unknown, or other
  modified_base (145)..(145): a, c, g, t, unknown, or other
  modified_base (162)..(162): a, c, g, t, unknown, or other
  modified_base (175)..(175): a, c, g, t, unknown, or other
  modified_base (178)..(178): a, c, g, t, unknown, or other
  modified_base (184)..(184): a, c, g, t, unknown, or other
  modified_base (195)..(195): a, c, g, t, unknown, or other
  modified_base (239)..(239): a, c, g, t, unknown, or other
  modified_base (271)..(271): a, c, g, t, unknown, or other
  modified_base (277)..(277): a, c, g, t, unknown, or other
cccacgcgnccgaganancnnnngaggcaacggcaaaggcagaagcanccncangccgacaacnacccaggaaagcccacanngcngnacnaccnagnccaggcannggccacgncacaccccnccgagagcncnccaagcnccngggcacacaccaccagngccacgggaccgnccncaacgncaccaccgaancggccgcagcccaaaacaaccaccaacacgccccaacccgcccncccaaccaccacggcggcgaacccccacccgnagaccncgccaccagggacaacgaccaaaccacc

SEQ ID NO: 665 - DNA, 247 bp, Lilium asiatic
tcgtacacactttcgaactgctctagaatacttcagaacgcgtatgacttgtatcctgtgtagggtcttttatatcatctgttcattcacgaacacactcaacgttcaattccaaacactctctacctttctaatacacattatttgggtttccaattcctactattatcttttgcaaaattaccaatttcttcttacatttatcttataaaagattccatagataggaacttttcctttatcaatt

SEQ ID NO: 666 - DNA, 414 bp, Lilium asiatic
agaagaacaagtagttgagaactaagaaggagaagcaaatggcttcctcaatgatctcgtccccagctgttaccactggcaaccgtgccggtgccggcatggttgctccattcactggcctcaagtccatggctggcttccccaccagaaagaccaacaatgacattacctccattgctagcaacggtggaagagtgcaatgcatgcaggtgtggccaccagttggcaagaagaagtttgagactctttcctacctgccagaccttgatgatgcacaattggcaaaggaagtagaataccttcttaggaagggatggattccttgcttggaattcgagttggagcacggtttcgtgtaccgtgagcacaacaagtcaccaggatactacgatggacgctactggaccatgtgga

SEQ ID NO: 667 - DNA, 417 bp, Lilium asiatic
gcttgagacatccaagagcagctcatctgtggagaagagctatgagcttcctgatgggcaagtgatcaccatcggagccgagaggttcagatgcccagaggtcctcttccagccatcactgatcgggatggaagctgctggcatccacgagaccacttacaactccatcatgaagtgcgatgtcgatatcagaaaggatctgtatggaaatatcgtgctcagtggagggtcgaccatgttccctgggattgctgataggatgagcaaggaaatcactgctcttgctcccagcagcatgaagattaaggtagtcgccccgccagagcggaagtacagtgtctggattggaagctccatccttgcctctcttagcacattccagcagatgtggatatcgaaggcagagtttgatgagtc

SEQ ID NO: 668 - DNA, 264 bp, Lilium asiatic
  modified_base (10)..(10): a, c, g, t, unknown, or other
cccacgcgtncggcctggggagaagtccatgaaaccagaccctaaacttagcaaagactactttgcagcggggtagctaggatactagatggttaagagtggctatctgcatctgtatcagtcagtgtgaattgcaaaagggtcttgtttcttaatgttttgtaagtccttaaattttgagccgcagggtatgggaatatactaataaatgcatgctggattttgaagtgtactatgtattaatttgcaatttattttgattaa

SEQ ID NO: 669 - DNA, 440 bp, Lilium asiatic
cccacgcgtccgcccacgcgtccgtgctccattaataactgctgtggtatctgcttgggcctttctcgtatctaccatgagcgatttgaagctaaattctaaaaattggcaaaattcaatatcttatttatcaagtcttctagacaaggaagaccggcctgtgcgtattgctgctggcgaagcactggttgtaatttttgagattggaatcacagagaaattttctgctgattctaagggtgcaagtgatatgactcaagaagagattaatcggcaggaaagttatacccatttacaaggattgaaagcgaaggtcatcaatcaagtcaaaaacctttctgtggaggctggtggaaaaggttctgctaagaaagatctgaataatcagaggaacttgttccgagatatcgtagacttttttgagtatgggtactctcctg

SEQ ID NO: 670 - DNA, 292 bp, Lilium asiatic
aaaaaagcgatcatagtttcacttcggccttatccagtttagggtttcggttctctacgctatctttcacgtatcgagaccttaaatttacgatcaggtctgagcaatctggttggtagaacctttggtcttagtgagtcaagttttatgtctgaattaaacgatcaaattcctactgccttcgatccttttgctgatgcaaatgctgatgactcgggggctgggtcaaaggagtatgtgcatattcgggtccagcagcgaaagggtaggaaaagcctgacaaccgttcagg

SEQ ID NO: 671 - DNA, 399 bp, Lilium asiatic
  modified_base (26)..(26): a, c, g, t, unknown, or other
cccacgcgtccgcccacgcgtccggntaccactgtcgagcgtgccggtgccggcatgggtgctccattcactggcctcaagtccatggctggcttccccaccaggaagaccaacaatgacattacctccattgctagcaacggtggaagagtgcaatgcatgcaggtgtggccaccagttggcaagaagaagtttgagactctttcctacctgccagaccttgatgatgcacaattggcaaaggaagtagaataccttcttaggaagggatggattccttgcttggaattcgagttggagcacggtttcgtgtaccgtgagcacaacaggtcaccaggatactacgatggacgctactggaccatgtggaagctgcctatgtttggttgcactgatgct

SEQ ID NO: 672 - DNA, 421 bp, Lilium asiatic
  modified_base (55)..(55): a, c, g, t, unknown, or other
cccacgcgtccgcagatctgttagcaactgccttgtgtgttgattctattgccgnggattagggttttttttcacgagattgcttcagatccgtacttaagattacgtaatggattttgattctgatttatctgtgattgttgactcgacagatgcagatcttcgtcaagaccctcaccggcaagaccatcacccttgaggtggaaagctctgacaccatcgacaacgtcaaggccaagatccaggacaaggaaggaatccccccggaccagcaacgtctcattttcgccggaaagcaacttgaggacggccgtacccttgctgactacaacattcagaaggagagtactcttcacctcgtcctccgtctccgtggtggcatgcagatcttcgttaagacactcaccggcaagaccataac

SEQ ID NO: 673 - DNA, 367 bp, Lilium asiatic
  modified_base (2)..(2): a, c, g, t, unknown, or other
gntcaagaggggataaaggcatctgataattctcaaagttcaaagggacaaaaggcatgcttatcaactctagcatttgcagctgaacatgaatctgacattaagatgaaataccctattggtggtttgccgatatgatcagaggacaaagttttgtggaagtttcaaaaaaaggcacttcccaatttggtagatgataaccagacgggtgtttagttatgtgtggtgctgaaatcttttagcaatttcactctggaaccgatattttttttattggaagttggaacatgattaaatgtatataatagcactcatttacagtccatgagatatcaaaggtagagtgtatataatagcactcatttat

SEQ ID NO: 674 - DNA, 344 bp, Lilium asiatic
atttcttcatcggttgttcaagtaaatggccttcgtgaccactgctgaagtgtgtgaggcgaacccccagctaattttgagtggggagcttcgtgcccttcagccagtttttcagatttacggtcgtcgacaggtcttctctggacctatagttaccttgaaggtgtttgaagacaatgttttggttcgtgagttccttgtagagaaaggcaatggaagagtgcttgttgttgatggaggcgcgagtttacgctgtgctatattgggtggcaaccctgtggtacaagctcaaaacaatggatgggcaggtattgttgcgaatggatgtataaatagatgggatg

SEQ ID NO: 675 - DNA, 429 bp, Lilium asiatic
cccacgcgtccgatttttcacaccaccaagccaacagaagatgtttctccacattgttggcctcctttcccttctgtcatccacttcccatgccactgtccaagacttctgtgtggcagaccttaagggtgcagacaccccttcaggctacccctgcaagccacctgcaaatgtaacttcagatgactttgtgtacacaggcttagctgaagctgcaaatgtcacaaacataatcaatgctgctgtgaccccagcttttgttgctcaattcccaggtctcaatggccttgacctctctgcagcaagattagaccttggtcctggtggtgttattccactccacactcaccctggtgccaatgaactactcattgttctccaaggtcacatccttgctggattcatatcttcaggtaacatagtttatca

SEQ ID NO: 676 - DNA, 427 bp, Lilium asiatic
ttatgaagtaaaattatgaaattgttcatagttaatgtgaatttgatcttctatgattgaaatgtggactatgatttatgtttgagccccctctatattgtgatcttatgactcgataaacctagaattcatggctgagttggaattgagggtattattttatgccggtatcaatttgcacttgtgtgctatctttagcctcctcgggttgcgactactatgaattactatttctgaaattttgaaatttaaaggggaaaggttttcttttcaaatttgtatttacaactatgggtgcatttttagctcagtgttaaaatttggcttttgtggcatttgcatccctaataatgataattagctttcttgggttcactatctatctggaattcaagtcttcatttaactggttgacatttgactttga

SEQ ID NO: 677 - DNA, 445 bp, Lilium asiatic
ggagctcactgtcgaggagcgcaatttgctgtcgggtgcgcataagaatgttattggtgcccgccgtgcttcgtggcgaattatctcctctattgagcagacggaggagagccgtgggaatgaggaccatgtggttttgattaaggactatcgtggtaagatcgaggctgagctcagcaagatatgcgatgggatccttaaactgctagactcccaccttgtcccgtctgccgctactgctgagtcgaaggtcttctaccttaagatgaagggtgattatcacaggtatcttgctgagttcaagacgggggtggagaggaaggaggctgccgagaatacacttttggcatacaagtcggcccaggatattgctcttgctgacctagcttcgactcatccaattcggctagggctggcccttaacttctccgtattctattacgag

SEQ ID NO: 678 - DNA, 433 bp, Lilium asiatic
gacgagtctattcgtgcttttgctgagtcttcaatgaatactgcttatgagaaagggtggccactatatcttagcaccaaaaatacaattctgaagaagtacgatggaaggttcaaggacatattccaagaggtgtatgaagctgaatggaaatccaagtacgaggcagcaggaatatggtatgaacatcgactcattgatgatatggttgcctatgcgcttaagagtgacggtggttacgtatgggcttgcaagaactatgatggagacgtgcaaagtgatttcttagctcaaggttttggatctcttggattgatgacatcagtactggtttgtccagatgggaaaaccattgaagccgaagctgcacatggcacggtgacacgacatttccgtgttcaccaaaagggtggtgaaaccagtacaaatagca

SEQ ID NO: 679 - DNA, 417 bp, Lilium asiatic
atctggagtaattaatgaacaaaatattgcagaatcaaaagtagctctagtatatggtgaaatgaatgaaccgcccggagctcgtatgagagttggtttaactgccctgactatggcggaatattttcgagatgtcaatgaacaagatgtacttctatttatcgacaatatctttcgcttcgtccaagcaggatctgaagtatctgccttattgggtcgaatgccttctgctgtgggttatcaacccactcttagtactgaaatgggttctttacaagaaagaatcacttctaccaaagaggggtccataacttctattcaagcagtttatgtacccgcagacgatttaaccgatcctgcgcctgctacgacatttgcacatttagatgctactactgtactatcaagaggattagc

SEQ ID NO: 680 - DNA, 223 bp, Lilium asiatic
gaagaacaactctactctttcttggtgtagtgtctggtagctattttatagtgtcaggtaaaggacagtgtttagtttctttctggggtctgagaattgaatctggatttagaccatatagttcagtaagccaatgttttccaactttctttggcaatggtattagtgttattgtgaccggagaacctaatgttggacgattagctttgtttggtttcgtttt

SEQ ID NO: 681 - DNA, 414 bp, Lilium asiatic
  modified_base (15)..(15): a, c, g, t, unknown, or other
  modified_base (30)..(31): a, c, g, t, unknown, or other
  modified_base (39)..(39): a, c, g, t, unknown, or other
  modified_base (51)..(52): a, c, g, t, unknown, or other
  modified_base (61)..(61): a, c, g, t, unknown, or other
ctgatccgcgcactnagcaccgcggccatnngaaggcgngcgctcactacnngctcgcagngcccggagagccctctcccaacttcccgacaaaccctcccaaaccaaacccatcgctgtcgtcgtcgtcgtcgtcgtcgatttcctcacactgtttcaacctctcttcgtctctccgccccaaacactcgctattctccaggttccgcaggatctgtcacaaagctaaggctaagccgcaggaacctgaagtgactgtggcgagtgatgcatttacgcaattcaagcatctgcttctgcctattacggataggaatccctatctctctgagggtacaagacaagctatagcaaccacctctgctttagctaaaaagtatggagctgacattactgttgtagttattgatgcac

SEQ ID NO: 682 - DNA, 205 bp, Lilium asiatic
  modified_base (14)..(14): a, c, g, t, unknown, or other
cacgctagacgccnattcaaaagtaactctagtatatggtcgagatgaatgaaccgcccggggctcgtatgaaaagttggtttaactggcctgactatggcggaatattatctagaatgtcactgaacaacatgtacttatatttattgacagtatctttagtttaattcaagggcgatctgaagaatctgccttattgggaaaa

SEQ ID NO: 683 - DNA, 396 bp, Lilium asiatic
  modified_base (9)..(9): a, c, g, t, unknown, or other
  modified_base (12)..(12): a, c, g, t, unknown, or other
  modified_base (25)..(25): a, c, g, t, unknown, or other
  modified_base (28)..(28): a, c, g, t, unknown, or other
ccacgcgtncgnccacgcgtccggnggnctgcaactatgagcaaggattatctaatcatactttctctgcttctttccacggtgcttgcaactgcaagttcttcttcttcttcttcctccctctatcttgggaagggcttctcccatcgcaaattgtctcccagttatcacattcacaaaaccattgacgaatcctatgcagttatcttcgatgctggtagcacgggaagccgtgtacatgtctatcgttttaaccaacaattagatctccttcgcattggccaagaccttgagttgtttgtcaagactatgccaggtttaagtgcttacgctgagaatccacaagatgctgcagaatctcttattccacttttggaggaagcagaagctgctgtt

SEQ ID NO: 684 - DNA, 412 bp, Lilium asiatic
gacgagtctattcgtgcttttgctgagtcttcaatgaatactgcttatgagaaaaagtggccactatatcttagcaccaaaaatacaattctgaagaagtacgatggaaggttcaaggacatattccaagaggtgtatgaagctgaatggaaatccaagtacgaggcagcaggaatatggtatgaacatcgactcattgatgatatggttgcctatgcgcttaagagtgacggtggttacgtatgggcttgcaagaactatgatggagacgtgcaaagtgatttcttagctcaaggttttggatctcttggattgatgacatcagtactggtttgtccagatgggaaaaccattgaagccgaagctgcacatggcacggtgacacgacatttccgtgttcaccaaaagggtg

SEQ ID NO: 685 - DNA, 124 bp, Lilium asiatic
atactcggttggtctgcttgacgacaccaacctgtgcgccatccatgccaagcgcgtcaccatcatacccaaagacatccagcttgcccgccacatccgtgacgagaggccttgaaatttctct

SEQ ID NO: 686 - DNA, 299 bp, Lilium asiatic
aaactcccaactatctacattccttcatcttatcccatctcctactttttatcaaccaactcttaccaccaatcttacaatactccattatcttattactaccaccaaaaattattccatcacctcttttcaaactatatatttcacctccttattacttaacatatcctccttcccccacaaccttttcccatctttatactacaactaacctttcacatcataactcttaacttaccatctatcctccattttatcctcttcattcaacatctaaaaatcctcactccttatttatt

SEQ ID NO: 687 - DNA, 446 bp, Lilium asiatic
cggacgcgtgggccttggtgatattatttctcgagcaaacttgactgatatatgaattgctaatactaatcttcaacataatgctcacatccttgcctctgatggagagttgtttcttgattctacttactatcatcagttagttgacaaacttgtctatctttgtaacactcgctcggacattactaatgctgtggatgttctcagttagtttgttcatgccctcagtccatccattatggcccactgttgcaaattcttcgctacttatgtggtacgactattccctccctgttatttcccttagcaccatctctagaatttcttgcctacttcaacaccgattagggtggttgttcgacgaattgtcattacaccattggttactatttgtcgtaacaagaagcaatattatattttccggtgaaatggtgaaccaatggtgt

SEQ ID NO: 688 - DNA, 149 bp, Lilium asiatic
  modified_base (24)..(24): a, c, g, t, unknown, or other
  modified_base (30)..(30): a, c, g, t, unknown, or other
  modified_base (36)..(36): a, c, g, t, unknown, or other
cccacacatacgggtaaatttaanattttnctccancatttattttacattcaactcaatttatataaccccccgccttttttcaaccaccaccccctctctcttcttctcctccttcatcttcccttccatttatccaaaaacaccta

SEQ ID NO: 689 - DNA, 440 bp, Lilium asiatic
gcggacgcgtggttttcttagaaatcttacttctaaatctaagagtctctctgcagatgccctggtaccatcgtcacctgtaaagatcccagagattgctgagtctgctcttgacaatgatgaagagaacccgctgttggaaacggttcgcggaaaatgcattactcagttactacttctaggtgttcttaacagtatccagaagaaatactggagcaagttgaagtccccggagaaaattttgataatggacatcctgttgtctgtcctagattttgctgcttcatataattcttcttcaaaccttagaacacgcatgcaccaaatacctgcagaaaggccgcctgtaaatctattgcgccaggaaatagcaggaacttccatttatttagatatattacagaagtcgacctccacatgtagcagtagtgaagagcatg

SEQ ID NO: 690 - DNA, 372 bp, Lilium asiatic
taatctctttaaactttttattcttccattgacttcatcaccgtccgcccgattcatttacaaacaagggccgccctatccaccaaaatcttctttaactcttttctctcttcatgtcttcttcttatcaccatcctctctctgctctaaacttcctcttatctttacacacactacaacttatatactcatctctacttccttaatataacttctcactcaacgtactgacaacacaaagtatatcgtccttccactttcttctaccactttctacttactattatcaacaactatatcagcccataccttcataacttctactttacacaatagctcttctatcacaaccccttttcacaacttatctta

SEQ ID NO: 691 - DNA, 455 bp, Lilium asiatic
cggacgcgtgggtggtttaggtgcacgtgacagcctccgcctcgaagctggcctatgcttgtgcggtaatgacatggaacagcatgtcacacccgtggaggcaggcctttcatgggcaatcggtaagcgaagacgagcagaaggtggcttcctgggcgctgatgttatactcaagcagctcgcagatggccctgcgatcaggcgtgttggtttattctcatcaggcccacctgctcgaagccacagtgagatagtaagcagttcaggcgagaagatcggggaggtgactagtgggggattcagtccatgcttgaagaagaatattgcgatggggtacgtgaagtccggttcccataaacctggcaccgaagtcaagattggtgttcgtgggaaatcctacgatggggtcgtgacgaagatgccgttcgttcctaccaaatactataagccaacat

SEQ ID NO: 692 - DNA, 391 bp, Lilium asiatic
  modified_base (369)..(369): a, c, g, t, unknown, or other
gagatccgcaggtttaaaaaaaccacggagctcctgatccgcaagctccccttccagcgcctggtgagggagatcgctcaggacttcaaggccgacctccgcttccagagctccgctgtctcagcgcttcaggaggcctcggaggcatacttggttggtctgtttgaggacaccaacctgtgcgccatccatgccaagcgcgtcaccatcatgcccaaagacatccagcttgcccgccgcatccgtggcgagagggcttgaaatttctctctctgtttgctcctcctgtgggtggtttctactgtctcgtagaaagttgcaattcggcagtcagtttatgcaatctaattgaagtttgttatctgcctncttaaaaaagcatgtaccacat

SEQ ID NO: 693 - DNA, 438 bp, Lilium asiatic
gctctggtggtttatataggctcttgaaactctggattcttctattgtcttcatcaccgtttgctgaatacaatcaccaacaatttctgctgtagccaccaggatctccttgggcttttctctgtcttcatgtctgcttctggtcaccatcctctgtctgctctaggtgtgctctgatggtgagaggcagttcaactgatattgtcatgtctgcttgcttgggatagcttctgagtgaaggtgctgagaggagaaggggggtgtgctgcacttgctggaccactgtctactaactgggatcaagagtgagaggagcccatagcttcatagctgctacttgtcacaattgctcttctatcacaaccgctatcacaagctaatcttagaagtaatatgcctctactacatcagactgaaccatctatagctccatgacta

SEQ ID NO: 694 - DNA, 439 bp, Lilium asiatic
gtggctgagcactttagagatgccgaagggcaagatgtgctgctttttatcgacaacatattccggttcactcaagcaaactccgaagtgtctgcattgcttgggcgtatcccatctgctgttggttatcaaccaactcttgccaccgatcttggtggactgcaagagcgtattacgacgacgaaaaagggttccatcacctctgtgcaagctatatatgtgcctgctgatgacttgacagatcctgctcccgccacaacctttgcccatcttgatgctacgactgtgctgtcacggcagatctctgagcttggtatctatcctgctgttgatcctcttgattcaacatctagaatgctttctcctcatgtattagggcaagagcactacaacactgcacgtggtgttcaggaggttcttcagaattataagaatcttc

SEQ ID NO: 695 - DNA, 445 bp, Lilium asiatic
cccacgcgtccggccgaatctcttggagctcatgcattcctcggatatcattatttctcacgtgatcttcctgaactcaccattttggaacatccatcctgtttattgcagcaatgtggtaatacaccatttgactgtgttggcccctcacgactctccaaacacagacggagtcgatccagattccagttctaatgtctgtatcgaggactcatacatctcaactggtgacgatttggtagctgtgaagagcggctgggacgaatatggtatcgcctacaaccgcccaagctccgacatcactgtccgccgaataacgggctcctccccctacgctggtatagcagtcgggagcgagacctctggcggagtccagaatatctttgtccagaacattaaaatcttcaactctggcattggcatccacatcaagactaatgtgggc

SEQ ID NO: 696 - DNA, 423 bp, Lilium asiatic
gctcatcccattgctggcaggcacactcctggaactttcacgaatcaactgcagacctctttcagtgagccccgtcttctcatcctcactgatcccagaactgaccaccagccaatcaaggaggctgcactgggtaacattcccaccattgccttctgtgacactgattccccaatgcgatatgttgatattggaattcctgccaacaacaaagggaagcacagtattggttgtcttttttggttgctggcaagaatggttctgcagatgcgtggtactattcctcttggacacaaatgggatgtgatggttgatttgtttttctatagggatcctgaggaggccaaggaacaagaggaaaagaggttatagctcctgttgactatgctcctgctactggatatacaggcggaatcacaactg

SEQ ID NO: 697 - DNA, 440 bp, Lilium asiatic
ttgaaggggtgggaagttcgccaaggtacttatttccaggacgtggttgtttccaagtatgatggaggaatggatgcaaaatttgagtttacagagtcaggagaagccttattctcaggatatgttttgactcgaggtggttatgtcgaactttcaaagaagctatctctcccattgggtttaacgcttgataggtttgatggtttggttctttctgttggtgggaatggaagatcatttgtcttgattcttgagactggaccccttgccgatacttctcaaagcaaattgtattttgctcgaatgaacacaaaagtgggcttctgcagggtgagagtgccattttcatcttttcgtccagtgaaaccggatgatccaccgcttgatccttttcttgtacacactttaactattcgctttgaaccaagaagacagagagc

SEQ ID NO: 698 - DNA, 460 bp, Lilium asiatic
  modified_base (397)..(397): a, c, g, t, unknown, or other
aagaatcctggcaaaccggcagtctgcagcccgttcaaaagaacggaaagcacgctatatttcagaacttgagcggaaagttcagacccttcaaactgaagctacaactctatctgctcagctcacactattccagagagatacaactgggttgacctcagaaaatgcagagcttaggttaagattacaagctatggagcaacaagctcaactacgtgatgcactgaatgaggcactgaagcaggaagttcaaaggctcaagatcgcaacgggagaaccctcaaaccccaccgaaacatacaccgtggaactaaatgccccctacaatccttcgatgttcacattttcgcagcacctggctggcgacaaccaacacatgcaactgcatccacagttncatcagtcccaaacaaatgcatcaaaccaccagattctcaccttctcagacatgatgcaacag

SEQ ID NO: 699 - DNA, 462 bp, Lilium asiatic
gcgtacggtcgcggtcgcagctacagcagaagtcgtagttacagtcgatctagatctcctcggagggtcaggagcgcagcttcatctaagagaagggagcgcagtctcacccccgatgcaaggccgataagaagggatcgcagtgtgtcccctgttggaagcaggagccctccagaggagcggtctgttagtcctgcgccaaagagaggtgcaggagctcgtgatggatcagactacgatgaaagcccaaggaggagggcgactagcagaagccccatgagccaggacgagcaagagagcccagctgcacggggtgccagcactagccccaaggccaatggtcggagccccagtcctgagaaggatgatgatggatatgcatctcgtggggggagtcagtccccttagttcagttttttcttgagctaaattggtgttgatttctggttggtgctgtaataa

SEQ ID NO: 700 - DNA, 449 bp, Lilium asiatic
cggacgcgtggccaaaactaagggacataaaagtcatgcctaagttcctatgtgtaaggggtggatgttttgtctaatgttcctagggttaagggacacaaaatttatgactaagctccccgagctaaggggtggaagttatgaataaatttactagagataagagacacaaaatttatgccttagctcatagtacaaaggggtgaaagttatacctaatgtttcctgggtcaagggttattaacatcaagtttttaggtacctctattgcaacccaaggttctcaagatcaatggacgaatgtttaaagttttcaactaccttgcttttcccaatatgagagggattcaactctaagtttgaagtatgtatctctatcatcttcatttgaagtactaaccaacacacttgtaatttgtatcactaagttccccagattatggggccta

SEQ ID NO: 701 - DNA, 443 bp, Lilium asiatic
ggaggaggtccccgatctcaccgatgagtaccgggagacgatgagggagttcgtcaagaggctgggagagctagcggaccagcttctcgacctgctgtgtgagaacctggggttggagaaagggtatttgaagaaggcctttagtgggacgaaggggctgaccttcggtaccaaggttagcaactatccgccctcaccgaagccggatctgattaagggccttcgtgcacacaccgatgctggcggcctcatccttctgtttcaggacgacaaggtgagcggcctccagctgctcaaggacggtgagtgggtggacgtccctcctatgcatcactccatcgtcatcaacctcggtgatcagcttgaggtcattacaaatggcaagtacaagagcgtgctgcaccgagtggtgtctcagccggacggtaccaggatgtcgattg

SEQ ID NO: 702 - DNA, 449 bp, Lilium asiatic
gagtttttcagtgatgaggaacagcagtgtggtctgacaagaatgacaattgaaactatgaccggaagaaccgaatgctacccaggccaatatagaagtcacgattcctatttgttgtcctcagttcgctcaagttacgtgcactcttgcaatttagacttatgggccataactttacatcagccaactttctggtttgataagtcattttctatcttggaacagtctaagctcttagatcatgatttgaagcatgagattacccaaaatcaagagggttgttaggaggttgtggcattgctactgatacaagtactccaaaaatgaatggcttttggtcattttacggctcagctaaagtcttagcaaacgagaattcaacatctcaacaagtttcaagttcctgaagtaccaaggtttcccttaaacatctcaacatatgcagacgt

SEQ ID NO: 703 - DNA, 319 bp, Lilium asiatic
  modified_base (56)..(56): a, c, g, t, unknown, or other
  modified_base (60)..(60): a, c, g, t, unknown, or other
gcgtccgctacgaaattatcttacctaatctttctaccttatttctgagaatcaantcanagccggcccgtcattttactatgattgtgaagcacaatcatattcatcatcaaactaacccttatgctacaacaaaaatccatctcattcaaatacacccactttaaacaaacacaaaacttcctcttacttaaacatacctacaaaattcaatgctccaaagactacaaatccatctaacaccccttctttatcttgtaaattatttattcccccacctaatcaaatttctaaacaaacatataatatgtatcaatat

SEQ ID NO: 704 - DNA, 448 bp, Lilium asiatic
aaatgaatgagcccccaggtgctcgtgctcgtgttggacttactgggctgacagtagcggagcatttccgagatgctgaagggcaagatgtgcttctcttcattgataacatcttccgctttacccaagcaaactcagaagtgtctgctttgctcggtcgtattccgtccgctgttggttaccaaccaactctggccactgatcttggaggtcttcaagaacggatcaccactacaaagaagggctctatcacctctgttcaagctatttatgtacctgctgatgacttgacagatccagcacctgcaacaacctttgcacatcttgatgcgacaactgtgttgtcgagacagatatctgagcttggtatatatcctgctgtcgatccacttgattccacctccagaatgctttctccacacgtattaggacaagagcactacaatac

SEQ ID NO: 705 - DNA, 439 bp, Lilium asiatic
  modified_base (419)..(419): a, c, g, t, unknown, or other
cgttgagtggggatggaacggtgccgatgtggtggggaatagcggcggatgggtcggtggtggtgtcggatgtggtggaggtggtgaagggcgggtgtgggaagtcttttgctccgttcccggcgggatgtatgttccacagtgtcggtggcctaaagagtttcgaacatcccttgaacaagatgaaggcgatgccaagggtagatagtgaaggagtgatgtgcggagcaagctttaaagtcgacaaatactcaaggatcaacagcatgccccgagtcgggagtgccacaaactggaccgacctcatgggatgatgaaatttaccaatgactgtggagatgatccgtaaacaacaacgaagactgctagttcttacttgttgctttaagagaatgagtaacttggttttaactactttntactatgcttttgaatctta

SEQ ID NO: 706 - DNA, 449 bp, Lilium asiatic
agcggctccaatggcggacgacgactacaacgatgatatgggatacgaggacgagccaccggagcctgagattgaggatgggattgaggaggaggatgatgctgaaaataacaatgaagatgttggtgatgtgcctgtaggcgatggcgaagacaaggaggagccaccaaaagaacggcctcgtaagacttccaaatacatgaccaagtatgagagggcaagaatcttaggtacccgtgctcttcaaataagcatgaatgcaccagtgatggttgaattggagggcgagtctgatccattggagatagcgatgaaggagcttaggcaacgcaagataccttttactattcgtaggtatcttcctgatggaagctatgaagattggggggtggatgagctgattgtggaggattcctggaagaggcaagtaggtggtgactagatgtttc

SEQ ID NO: 707 - DNA, 414 bp, Lilium asiatic
gaacagcaaaaagcagctcatcagttgaaaagaattacaagctgcctgatggccaggtcatcaccattggagctgagcgcttcagatgccctgaggtcctgttccagccctcactcattggaatggaagctgctggcatccacgagaccacttataattcaatcatgaagtgtgatgttgatatcaggaaggatttgtatgggaacatcgtgcttagtggtggatcgacgatgttcccgggcattgctgaccgtatgagcaaggagatcactgcactggctcctagcagcatgaagattaaggtggttgccccaccagagaggaagtacagtgtctggattggagggtcaatcttagcttccttgagcactttccaacagatgtggatatcgaaggcggagttcgatgaatctg

SEQ ID NO: 708 - DNA, 455 bp, Lilium asiatic
ggcaaaatacattccaggactcctgaaaaaatcagaagaacggaagcgtgaacaggatgtaatatatgagagaaaactattgaaagagagaagcaaagacgaccacctctttgcagacaaggaaaagtttgtaacaaaagcttacaagcagaagctagcagaagaacaaaaatggttagaagaagagaggttgcgccaaattcgtgaagagaaggaggatgtaacaaagatgaaagacatgagcagcttttactttggcctggacaagaacatagcttttggtgcctcttcggaggcaaaaaagcctttaggcaaagtaccggaaaatgatcgctcccgagatgtagaagccaccaagttaaatactgaagtgcatatagattctgtgccagaaagagaggaagttgatgttccaatgaagggttctcaaaatgctaagcaagaaagagaggagc

SEQ ID NO: 709 - DNA, 434 bp, Lilium asiatic
cgacgaaattggcttaccgaatcttcctaccgaaatgctgagaatcggttcagggcggcatcatcagcctgctttgatggtgaaggacaagcatgggcgtcatcggcctttcccgtgtgcgacaacaaaaatcgatctggttcgaagacgcccactttaggcaagcacaaagctgggtctgacttggggaggcctccaaaatccaaggctccgaggactacagaaccatctgacagccctgctttagcttggaaatcatttctgcccccacctaatcaaagtcctgcgcaagcgtatgatatgtctcaatttatttcagacccttggaatgatgggcattattcgttcccaggccttgatgcatatctctacgagacagagagtagagaatatgtgatgcatgagtttgatcccagcttatgtgatggacttga

SEQ ID NO: 710 - DNA, 446 bp, Lilium asiatic
cagttttaacccccccaaactactgttcccgttggggtaccatgccacctttaatggaggtgggggggaccatggaccaaaatttcctccaattggatccgccaccgaggcaagtcgagccagacactactcgcaagactcccgactatttcttgtaaaaattgataacatccactggcggcgactacgacgatgatgacagtctacaccagatctctgtaaatgtatccttggaagaggagttttggtaagcggagatgttcctcaacattctttgtttggagtattctggagaggttacttttctagagacgcttttgttgtgtgaattgtgtttgattctggagaaaatattgcagcagtaataactagtgagttgtttctgttttatacacaaatgaattttcggaggaaacatgtaaagcctgagtgcactttaatgcatg

SEQ ID NO: 711 - DNA, 444 bp, Lilium asiatic
cccaaactactgctaccgtttttttaacatggcagctataatggagggtccgcacaacatggaacaaaatggcctgcaatttgatccggcaccgaggcaagtcgagccagacactactcgcaagactcccgactatttcttgtaaaattgataacatccactggcggcgactacgacgatgatgacagtctacaccagatctctgtaaatgtatccttggaagaggagttttggtaagcggagatgttcctcaacattctttgtttggagtattctggagaggttacttttctagagacgcttttgttgtgtgaattgtgtttgattctggagaaaatattgcagcagtaataactagtgagttgtttctgttttatacacaaattgaatttcggaggaaacatgtaaagcctgaatgcactttaatgcatgggatcgttattt

SEQ ID NO: 712 - DNA, 214 bp, Lilium asiatic
atttaacaaaattccctccaattttatccttcacctatgcaattctatccatacactactcgcaagactccctactatttcttataaaattgataacatccactttctcctactactactattattacagtctacaccacatctctataaatatatccttcaaaaaagacttttcttaatcctaaattttcctcaacattctctatttatatta

SEQ ID NO: 713 - DNA, 453 bp, Lilium asiatic
gcggatgttgattgttttttggggaccaattgcccaccagttcgcgttaatggcagtggtggtcttccagggggaaaggtgaaactgtctggatcaatcagtagtcagtatttgactgcattgctcatggcagctcccttagcccgtggagatgtggagattgagataattgataaactgatctctgtcccttatgtcaaaagaccatggaacctaagggaccctttggtggaactggggaacacttcggcagctgggacaagttcttgatcaaaggtggccaaaaatacaagtcccctggatctgcttatgttgaaggcgatgcatcaagtgctagctacttcctagcaggcgccgcaatcaccggtggcactgtcactgtggaaggttgcgggacgagcagtctgcagggtgacgtaaactttgcccaagttctcgagaaaatgggggcaa

SEQ ID NO: 714 - DNA, 454 bp, Lilium asiatic
ccggccgatccaaaccaaaaatcgccggattcgcagcggagatctgacgatgcactcgttcctgtaccgcgcgaacgcgctggtcacgttcgccgtgacgatcctcgccgccatgtgctgcatcgcctccttctccgacaccttcaacacccccacccccaccgccgacgtcaaggtcatgaacataaactggttccagaaacatcaaactggagatgatgaggccaggttgacgttgaacataaccgcggatctacaatctctgttcacctggaatacaaaacaggtctttgtcttcctagccgctgagtacgagacctctgcgaatgcactgaaccaggtttctctgtgggatggtatcataccatcgaaagagcatgcaaagttttcggttcatacaacgaacaagtaccggtttattgaccagggaagcaacctaaggggtaaggagttc

SEQ ID NO: 715 - DNA, 400 bp, Lilium asiatic
  modified_base (23)..(23): a, c, g, t, unknown, or other
  modified_base (51)..(52): a, c, g, t, unknown, or other
  modified_base (91)..(91): a, c, g, t, unknown, or other
cggccgatccaaacccataatcnccagattcttattttagatctgacgatnncactcttccgctacgacgctaactcactggtgacgttcnccataacaatcctctccgccatgtgctgcatctcctccttcttcgacaccttcaacacccccacccccaccgccgacgtcaaggtcatgaacataaactggttccagaaacatcaaactggacatgatgaggccacttttacgtttaacataaccgcggatctacaatctctgttcacctggaatacaaaacaggtctttgtcttcctagccgctgagtacgagacctctgcgaatgcactgaaccaggtttctctgtgggatggtatcataccatcgaaagaacatgctaagttttccgttcatacaa

SEQ ID NO: 716 - DNA, 441 bp, Lilium asiatic
gccaccttcattcgaagcaaatcagcgatgtctggtcgaggcaagggcggaacggggctgggcaagggcggcgccaagcgccaccgccaggtcctgcgggataacatccacggcatcaccaagcctgtcattcgacgtcttgctcgacgcggtggcctgaacaggatcagaggcctcatatacgaggagacccgtggggtgctgaagatctttctggagaaagtctattcgcgatgccgggacctacaccgagcacgcccgccgcacgaccgcgacggcgatggaagttgtgtatgcactgaagaggcaagggaggacgctgtacggctctggcggatgatgggtacgggcttgcctattttcttaaggggatgaatgttgatcctatgaagacttgtgctaggtctcgagtcaaatcatcagatgtctgatgcgatattg

SEQ ID NO: 717 - DNA, 362 bp, Lilium asiatic
  modified_base (7)..(7): a, c, g, t, unknown, or other
ctaccanatattacacaagatctttattttggttattcctggaaaatacacgcccgaatgtttcagctagtaaagtggcttgaattctttggtggaagtctgccgcttgtacgtattccatcagagtacatcatgtctttcggacgaccactatacatggcataatatggagttagcaagctggttcatcttatcaacaaaatgtccgacgcctttgtggtgtccggaaagggacatgaaaaacatttttttattcgtaatagccctgaagctaatcgtaccatgttcttgactattgttacgggagattttgaaaatcgacatgtaaataaattgacaagcacacctattatcttgaataa

SEQ ID NO: 718 - DNA, 446 bp, Lilium asiatic
  modified_base (381)..(381): a, c, g, t, unknown, or other
gtcacacaacacagactgtcgactcatctggtgaagaagagcttgctatccaaaggcttgagatcacaaagaatgagctccggataaggattgcgaaagaagctaaaggaaatgccattcttcaagcaagtttggaaaggagaaagcaggcattgcatgaacgtcgcttagcactggagcaagatgttgccaggttacaagaacaattacaagcagagcgggacctcagagcatctctggaggttggtttaagtatgtcttcaagacagttctctagttcacggagtatggattccaagacgagggcagaactcgaggagaattgccctagccgaggcagatgttgccaggttaaagcagaaggttgcagaactccacctncaacttaaccagcaacgccagcatcactatggatctgtgcctgaaacagctgaccgctatcagca

SEQ ID NO: 719 - DNA, 455 bp, Lilium asiatic
  modified_base (14)..(14): a, c, g, t, unknown, or other
gtcacacaacacanactgtcgactcatctggtgaagaagagcttgctatccaaaggcgggagggcacaaagaatgagctccggataaggattgcgaaagaagctaaaggaaatgccattcttcaagcaagtttggaaaggagaaagcaggcattgcatgaacgtcgcttatcactggagcaagatgttgccaggttacaagaacaattacaagcagagcgggacctcagagcatctctggaggttggtttaagtatgtcttcaggacagttctctagttcacggagtatggattccaagacgagggcagaactcgaggagattgccctagccgaggcagatgttgccaggttaaagcagaaggttgcagaactccacctccaacttaaccagcaacgccagcatcactatggatctgtgcctgaaacagctgaccgctatcagcatctttcaagt

SEQ ID NO: 720 - DNA, 398 bp, Lilium asiatic
atattgcccaaactgttgatgaatggccactgctagttacgtctaatgtttgtacacaatgccaatcatcactatcaccatcctccacccatacctttatagagttgtcataactgacagaaactagaatatcctcgaatggatgccattgcaccatcttgacatcttgtgaatgaccttgtaaaactgaaacacactcaaactcgttaccaggttgcatttcccaaatccaaacagacttgtcacgactacatgtggcaagcaaggacccagaagcactccaagaaacactctttacttcgttttcatggccctccaaggtagcaacacattcaaaatcaccaccaacatactcccatatagcagttgtggcatcaaaacttgcttgtgctagcagc

SEQ ID NO: 721 - DNA, 449 bp, Lilium asiatic
gcgatgaatcagattgtgataaagaagggttttagttatcagggtggtcgacaaatgatagggaagtggatgaggattccggagactgcgattaacctggttggagagactaaaatggttgattcggctggtagttctacgcaaaatgttgtggagaagttctcttttgatccacgctgctcgcaagcaaatgctggaacaaatggggtgtctcgtagtcgggaggaaagaaaccactatgaaggatgtgtttccgaagtacctattgctgaggctacagttattcctgccatacagtcggtgtcaatgagagatgttgggaccgaaatgaccccaatcccaagccaggatccgtcaaagactggaactcctctaagagccacaacttccaatctcagtcccatgtcttcaatgccctcgacacccaaaagaggagcaccgacattaac

SEQ ID NO: 722 - DNA, 377 bp, Lilium asiatic
agaagattcaaagctcatgatgtgctttgtcatccgtggattgttgatgacacggtggcacctgataaacctctagattctgcggttttatcacggctaaagcagttttcagcaatgaacaaactcaagaagatggctttgcgagttattgccgaacgcctgtcagaagaggagattggagggttgaaggagttgttcaaaatgatcgatacagacaacagcgggaccataacatttgatgaacttaaagatggcttgaaaagagtgggatctgaactgatggagcctgagattcagcaacttatgaatgcggctgatatagacaataatgggaccatagattatggcgaattccttgctgctactgtgcacatgaa

SEQ ID NO: 723 - DNA, 391 bp, Lilium asiatic
  modified_base (165)..(165): a, c, g, t, unknown, or other
atctattaaacagtgcaggtataactactcgttcaaaagccaagttagccctgatcgggacggctccacttcggcaagattgtgcaatattatcggacacattattgaaattcaggagcaagttttggatgaaaatgatgggatcgtgatcggaagaggtttganggtgacagcgcatttacaagacaattacatgcagagcgggccttaaccttctctaactttgtttaactatgtcttctgacagttctgttgttcacggattatgttccaagactgggcacaactcgtgtagattgtcctagcccaatcagatattgccagtttattgcatgatgttgcacaactccaccttcaacttaaccagcaacgcctgcattactattgatct

SEQ ID NO: 724 - DNA, 450 bp, Lilium asiatic
ggctaccagagtagtacacaagatcaggcattgtgggttattcctggagacgtacaaggtctgaaaggccagctagtaaagttgcttgagttgtttggtggaagtctgccgcttgtacgtattccagcagagtacatcaggtctttcggacgaccactatacatggcagaatatggagttagcaagctggttcatcttatcaacaaaatgtccgacgcctttgtggtggccggaaagggacatgaaaaacatctttttattcggaatagccctgaagctaatcgtagcaagttcttgactattggtacgggagatttgggaaatcgacatgtaaataagttgacaagcacaccgattatcttgaagaacgataagagaggaaagggtgctatgtcggaggataatggcatctgtcgaaagatgagtagctcctcagatgaagtatcagaa

SEQ ID NO: 725 - DNA, 411 bp, Lilium asiatic
agactctaacacatatggaagcggttacttccaatttctgggtatctactgcagaaagatggtgagtgtcttaacggccatgaggttttccagagacgggttgaggttgccttcaataattttgctgagtccactgaacgggcatgccgtgataaatgcatggaggacctaatgagcacaacacgttatgtcacttggtcgctccacaacaagaatcgtgctggattacgtcaattcctcgactcatttgctggcacagaatcgtacaatgggaactcttgctcagctacccagcaagaatcttgcttgggaccgttggctagtgaaagtaaacatgatagcaggtcgaagacagattcaaaaaccaaccaagtcacactaaatggtgattcaaactcatgtagtcataca

SEQ ID NO: 726 - DNA, 177 bp, Lilium asiatic
gcgatgaatcagaatgtgataaagaagggtttgaggaatcagggtggtcgacaaatgatacccaattggatgaggattccggaaactgcgattaacctggttggagagactaaaatggttgattcggctggtagttctacgcaaaatgttgtggagaagttctcttttgatccacgc

SEQ ID NO: 727 - DNA, 341 bp, Lilium asiatic
cgatgaatcaaaatgtgataaagaagggttttaggtatcagggtggtcgacaaatgatacgggaaggtatgatgattccggaaactgccattaacctggttggagagactaaaatggttgattcggctggtagttctacgcaaaacgttgtggagaagttctcttttgatccacgctgctcgcaagcaaatgctggaacaaatggggtgtctcgtagtccggaggaaagaaaccactatgaatgatgtgtttccgaagtacctatttctgaggctacattcattcctgccatacagttcttgtcaatgagagatgttgggactgaaatcaccccaatccca

SEQ ID NO: 728 - DNA, 465 bp, Lilium asiatic
cttccaaccaatggttccgaattattttggaggcctttggaaagttaccagatctgtccatgccaaaggaaaagggttctgaagggcatcggggtattggatttatcacttttgaaagctcagaagctgtagataccttgttggcagacactcatgagcttggtggttcaactgtagttgttgatcgtgctactccaaaggaagaagacaagtacccaatcagagcatcccagggtggatttggtgcatataatccacatggtggatatggtgcatataatgcttatatttctgctgcaactcgctatgctgctttaggtgcgcctacaatgtatgatactcctggtgcagcttatggaagagggctatttcaacaatcccgtggaatgggcaacaagatatttgttggtagacttccccaggaggcaactgcttgagatcttcgccattacttcggtagatttg

SEQ ID NO: 729 - DNA, 73 bp, Lilium asiatic
accaggccgacccacacgtccaattatatatatatttttttatctaaattttttcatataaccatcaacaaat

SEQ ID NO: 730 - DNA, 434 bp, Lilium asiatic
cggacgcgtgggcgcagattcagagctcagtttcagccataactcaggaaagacttgtaataccaaataagtatggagaaaagcttgttggagttcttgaagatcccggttctaagaaactagtgattctgtgccacgggctcacatcttctaaggaagaaaagcttatacttaaccttgctgccggattaactggacaaggattcagcatctttcgttttgacttctcaggaaatggggaaagcgaaggtgaattccaatttggcaactaccggaaagagagagatgacttgcatgctgtagtcctctatctatctcagaaaaagtatgaaataagtgctattgttgggcacagcaaaagggcaacttcggttctcttatatgcttcaacctaccgtgatgttggcacattcatcagtgcttctggacgattt

SEQ ID NO: 731 - DNA, 420 bp, Lilium asiatic
cccacgcgtcctataagactacagaatgtgtcttctgcagagcaaaagaaagaaagaaggaagctgcaacttcctctgttttgctcccctgtttaaaccttatcataagcttataatggcacacaaggaattttccattgccctagtgactctcattgttctctttgtcaacacgaacctccaaggtgccacggctgactatggtggtggttggcagagtgctcatgccactttctatggtgggggtgatgcttctggcacaatgggtggagcatgtgtttatggaaatttgtataaccattgatatttaactgacactgtaactctaaacactgctttgttcaacaatggcttaagctgttgatcttgctattaaatgaaatgtgattatgacccatgattgtgcaaaccttgctctat

SEQ ID NO: 732 - DNA, 453 bp, Lilium asiatic
cccacgcgtgcggttcggggtgccaccccacttacaatatcacattcaaagggtgatggactagacgaagaaggtttcgtgcatgaaaatattacactccttagagatatcaatgatccagcaaagcagttgtaagagactacatgaaatcatatcctcaagccaaatactacgaagatgcaaagccctggaatgtaccatgtgatattgcatttccttgagcttcccagaacgaacttgaccatgctgaagcaattgccttggtcaactctggttgcagaatacttattgaaggttcaaatatgccttgtaccccccaagcaatagatgttctgcggaaggctaaagttttggttgttccagcaaaagcagctagtgcgggaggggttgccattggagaattggagcttaatcatgagtacaacttgatgcagtggtctgttggcgaatttg

SEQ ID NO: 733 - DNA, 124 bp, Lilium asiatic
attgtatgtatatttgtttatttaaatatgttcatatatttatgaagaaatctgacttaggtgattttcctctattgtaaatcctacttgacctgtgatgcaagttgacatacaatgtggatcc

SEQ ID NO: 734 - DNA, 426 bp, Lilium asiatic
gttggaaaataaagataagccatcaaagtctggaaggtaaaacaacgcccagtaaaaaacgtggccagaggggtgtggagtcttcaactaatgaccggccagctaaaaaatcacgaaacaatagctctggtcataggcgtggtggtaggccatccaggacttttggcaaccaaaggactggttatgtggcacctcctgttacatttgcaccaagatacccattaccaccaaccggctatcaaggtccagcttatgccggaacttcaggatccaaccgtcgccattctgatttggaacctcatggtggttaccttcctgctgcgagaggagtccatagttcttatcgaactgatccgagaagagctgctgcctatgctagccaaccaagcagtggttctggatacccaagagcagctgtagtccact

SEQ ID NO: 735 - DNA, 174 bp, Lilium asiatic
cccacgcgtacgcattaccatcatcctctacttccttcatcacttacctaaaacctcataacacctccgggcagcttatcttcacataatgaacaacaaaaaacttaaaggaaaacctgcacaacccacttagtatgacttttgcaaataaaaatctatacatcttttttaaac

SEQ ID NO: 736 - DNA, 395 bp, Lilium asiatic
agtgaaacaaagcctacattcaagagggccgatgctaatgagccaaagcctgctcgaatcattggcaagttatcctttatcgaccttgctggtagcgagcgtggagcggatactactgataatgacaaacaaacgagaatcgaaggttcagagatcaacaaaagtttgctcgcacttaaggaatgcattagagctcttgacaatgatcaggttcatattcctttcagaggtagcaaactgacagaagttctaagggactcattcatcggaaactcgcgcactgtgatgatttcctgcatttctccgagttctggttcctgcgaacacaccctgaacacattgagatacgccgacagagtgaagagtctctcgaaaggaaatacttcgaagaaaga

SEQ ID NO: 737 - DNA, 460 bp, Lilium asiatic
atgtggctcttgcccaagaaggtcattgtagacccggagaggtattactgggcacagattcccacacatgcactgcaggtgcgtttggtcagtttgctactggaattggcaacactgatgcaggttttgtcctgggtactgggaagcttctactcaaggtaccccctaccttgaggtttgttttggatggagaaatgcccaagcacctgcttgccaaggatttgattttgcaaattatcggtgaaataactgttgctggtgcaacctacaaatccatggaatttgttggctctgccattgagggtttaaatatggaagagcggatgacattgtgcaacatggttatcgaagcggggggtaagaacggggttatccctgctgatgaaactacatttaagtaccttgagggtaagacatctatgaattatgaacccgtatacagtgatcaaaatgcaagatt

SEQ ID NO: 738 - DNA, 390 bp, Lilium asiatic
  modified_base (21)..(21): a, c, g, t, unknown, or other
cgtacgcctccgcccaccgtncgggcagtcagctcgcacccaaaatttcatcaccgccccctgctccttctcagcgatcaatggagttctggggtattgaagtgaaacctggtcaaaccgtcaagtgtgatcctggagaggaaaaatatctacatctttctcaggcatcattaggtgagacaaagaaggacaaaacaagtgaaaatgtgcctgtctttgtggaagtcaatggccagaagatggtcattggtactctatcaggagataagtgtcctcagatacagtatgatttagtgtttgagacggaattccaactgtctcacagctcaaagagcacgagcatcttttttgttggctacaggactcttgcctctgaagttgacccacaaa

SEQ ID NO: 739 - DNA, 401 bp, Lilium asiatic
cattaccatgtcggtctacttccttcacgactgccctaaagcggtggagcagctccgggaagagtatcttgacatagtgagcaagaagaaacagagaggagagcctgcagcactgacttgggaggactataggcagatggagttcagccaatgtgttataagcgagactcttcgcctgggcaacatcatcaagactgttcataggaaagccaaggttgatgtccaatttaaagggtatgatattccccgaggttggagtattattcctgttttgtcagcttctcatctggattctgtggtgtatgaagacccccacattttcaatccgtggcgatggcaggcagctctcccggcaggcagcacagctcgactagataactacatgccctttcggctggcct

SEQ ID NO: 740 - DNA, 231 bp, Lilium asiatic
ttcaaagtacttaagaaagagcagaaccaagtttaccaacacaagctgccaacataacataaaaacgcaaaaataccaagttcaactcttcagacaaactacgaatttaaagtcggtttaacaaaagctcaatcatcatcctcatcatcttcatcattggtggcatcattgagggcattcaaacgcttaacaagactagccttcctctcctcataagtcagcttcttcaaa

SEQ ID NO: 741 - DNA, 456 bp, Lilium asiatic
  modified_base (397)..(397): a, c, g, t, unknown, or other
atcaagtttatggtgatcctgaggcatatgatatggttaggcaaatgtgcattgattatatggaaagggagagagatcatttttctcaatttataactgaaggctttacatcttactgtaaaaggaaacggagagacaaggtttatggaaataatgtggagatccaggcttttgctgaaatgtataatcgccctattcatatttactcctatagcacagaacctatcaacatttttcatggaagctatgatactgatacacctcctgtaagattaagtttccatcatggtaatcattacaattcccttgttgatcctcgtcgattgacaattggcgcaggtcttggatttagtagtcttcaggggaccaacgttgatagagaccaggtgaaagctgntatcaaagctcagcaagaccagcagattgataatgcactgctagcggaggggcgattct

SEQ ID NO: 742 - DNA, 447 bp, Lilium asiatic
  modified_base (356)..(356): a, c, g, t, unknown, or other
ggtctcttagcactgtctgggctgaacatctcagtgaggaagtgagacgccggttctataagaactggtatagatcgaagaagaaggctttcacaaaatatgctctgaaattttcaactgagtccgggaagaaagaggtggaagctgagcttgaaaaaataaagaaatattcaactgttgttcgtgtgcttgctcacacccagattagaaagatgaaaggtctgaaacagaagaaggcacacctgatggaaatccaagtgaatggagggactattgccgagaaggtagactttgcctacaagttcttcgagaagccggtcccagttgatgctgtcttccagaaggatgagatgctngacatcattggtgtgaccaaaggtaaggggtatgaaggtgttgttactcgttggggtgttacccgtcttccccgcaagacccacaggggtc

SEQ ID NO: 743 - DNA, 459 bp, Lilium asiatic
caggagagcaaatatttgagaagacgatatctggtatgtacctgggtgaaatagtacgaaaagttctgctcaagatgtctgaagtttcaactttgtttggagagtctgttccagaccagctctatattccttacgtactaaggactcctgatctttgtactatgcagcaggatgactcagacgatctcaaagtggtaggagagacattaaacgacattgttggcgtaacaaggtccactttagacgcaaggaagattgtgataaacgtatgtgacacaattgtgaaacgaggtggaagactagccggggctggcattgttggtatcttgcaaaaaatggatcaagattcagaaggcctcatctttggaaagaggactgtggttgccatggatggtgggctgtatgagaattacccacagtacagaaattatctcaaagccgctgttacagagctgcttg

SEQ ID NO: 744 - DNA, 433 bp, Lilium asiatic
ctcaatacacatctacctctaactccacggggcgcttcattttttgccctctctttattatcatgaacaagagcgccaacaccattacatcactgctattcatgtcgataccgaagattacacaccgattcccctcccagagatctactttggcagcgaagcaacagctcttgtgaatcaatgtcagttggcagagttcagaggctcactttgcctgagttttgacttctactattcgaagagttcgttgcaactttggttaatggaagactaccgcagctgcaagtgggtgaaaggctacaacattgatctctctgccaagcctctatttttctctccgttagctattacacttgatggttgcatcttgcttagtactaaatcggcttcgccaaaggagcgtgatgagttgtgctattaccataaccaaaag

SEQ ID NO: 745 - DNA, 459 bp, Lilium asiatic
  modified_base (52)..(52): a, c, g, t, unknown, or other
  modified_base (212)..(212): a, c, g, t, unknown, or other
atcaaggcacatttacctttacttcacaatatctcttttttttttgccctcnctttattatcacgcaacgttttcttcaacaccatgacatcactactattcatgtctataccaaatattacacacctattcccctcccatacatctactttgtcaacaaatcaacacctcttgtgaatcaatgtcattttacatatttcagaggctcactnttccttatttttgacttctactattcaaacacttctttacaactttcgttaatttaaaactacctcatcttcaagtttgtgaaaggctacaacatttatctctctgccaaacctctatttttctctccgctagctattacactatatcgtttcatctttcttattactaaatcctcttccccaaaataactttattagttatgctattaccatacccaaaacaatttcctcacaaatacaatattaa

SEQ ID NO: 746 - DNA, 412 bp, Lilium asiatic
cggacgcgtgggcggaaaggttgactgtgacgagcacaagggtgtatgcagcaaattcggtgtttcagggtacccgactatccagtggtttcctgcaggctctttggagccgaaaaagtacgaaggtcagcgtactgcagaagcccttgcagaatttgtgaatgccgaaggaggaactaatgttaaactggcagctattccatccagcgtagtagtattgacatccgagaactttgatcaaatcgtcctagatgaaaccaaagacgtcattgtagaattctatgcgccatggtgtggccattgcaaaaaccttgcccctgtttatgagaaggtagctgctgctttcaggctggatgaaaatgttgtaatcgctaaccttgatgcagacaaatacaaagatttgggtgagaaa

SEQ ID NO: 747 - DNA, 319 bp, Lilium asiatic
  modified_base (10)..(10): a, c, g, t, unknown, or other
  modified_base (12)..(12): a, c, g, t, unknown, or other
cgcacgcgtnancagaaaggttaactgttacttgcacaagggtgtatgcatcaaatggggcggctcaagttacccgactatccagtgctttcctgcaatctctttggaaccgaaaaagtacgaacgtcattgtacttcagaagcccttgcaaaatttatgaatgccctaagatgaactaatgtcaaactggcaactattccatccaacgtaatagtattgacatcccaaaactttcatctaattgacctagattaaaccaaagacgtcattgtagaattctatgcgccatggtgtggccattgcaaaaaccttgcccct

SEQ ID NO: 748 - DNA, 420 bp, Lilium asiatic
gtcgagccggtagagccaaaaaccttatcagcacagccgtccaatacttctgtctcaagtgagggtgatgagccgaaggctcagcaaggtcctaacagatgcaatgcttgtcagaagcgggttggattgatggggttcgggtgtaagtgtggaagtatattctgtgcggcacatcgttactccgacaagcatgactgcccatttgattaccggactgcagccaggagtgctattgccaaagcaaacccagtggtgaaggctgagaagctggataagatctagaaggttaatgaagtgttgtttgatacctctcctttctgcaactatgccctttgatttcatgttggctgcttgtcttttaatctgactataaatggtggaggcgtgggtgcttatggcacctctgcagcctcgagaaca

SEQ ID NO: 749 - DNA, 424 bp, Lilium asiatic
cctaaatctagggttttcccccggcgccgtctccagattgtattcaatttatataactgagatgggcaagtcaagcaagaaatctgatgtcgccgtcgccgccgccgccgtccctgccgttgttccaaaatcagctaagaagggcaagaggggagctgaggaatctcctgctaagtcagtgagcgccaagaagcagaagaaggaagttgtggtgccgcccaagaaggaggagaagaagtcgaaaaaggttgagaaggcggcgaagaagggtttgagcaagccgccgccgaagaagaaggcaattaggagaaaaaaaaaaaaaaagggcgtagctttctcttctttggtaacgatgtcttcttgctgtggtggaaagtgtggctgcgggtcttcctgcaagtgtggcagtggatgcaatggatgt

SEQ ID NO: 750 - DNA, 396 bp, Lilium asiatic
ctccaccaaatcccccaaactcgaaaccttaatcctctgctccaatggcccgtacgaagcagaccgcccgcaagtccaccggcggcaaggcccctcgcaagcagctcgccaccaaggctgctcgcaagtcggctccaacgaccggcggagtgaagaagccccatcgctacaggcctggcacggtggcgctgcgtgagatccgcaagtaccagaagagcactgagcttcttatcaggaagctgccgtttcagaggctggtgagggagatcgcgcaggatttcaagacggatctgcgtttccagagccacgctgtccttgctctccaggaggcggccgaggcgtatctggtgggtctgttcgaggataccaacctgtgcgcgattcatgctaagcgcg

SEQ ID NO: 751 - DNA, 355 bp, Lilium asiatic
ctccaccaaatcccccaaactcgaaacctttatcctctgctccaatggcccgtacgaagcggagggtccgcaagtccaccggcggcaaggcccctcgcaagcagctcgccaccaaggctgctcgcaagtcggctcctacgaccggctctgtgaagaagccccatcgctacatgcctggcacggtggcgctgcgtgagatccgcaagttccataagagcactgagcttcttatcaggaagctgccgtttcagaggctggtgagggagatcgcgcatgatttcaagacggatcttcgtatccagagccacgctgtccttgctctccatgaggctgtcgacgcgtatctggctggtct

SEQ ID NO: 752 - DNA, 360 bp, Lilium asiatic
  modified_base (317)..(317): a, c, g, t, unknown, or other
acaacttgctctgttcaggcttcatccagatcaacagtgagattgctatgggagccaccatcgtcccctgtctctgcattcggtgactcccaatatgatatcagtattctcatctggaaggacccaaaggagggaaattggtggatgcaatttggaaatgactatgtactgggctactggccctccttcctcttctcttacctggccgacagcgcttcgatgatcgagtggggaggggaggtggtgaattctgagcccgacgggcagcacaccaccacccaaatggggagcggccggttccccgaggaaagttttcngaaaaggctagctactttcaagaacatacaagtggtcgacgag

SEQ ID NO: 753 - DNA, 433 bp, Lilium asiatic
cggacgcgtgggcttcaccaaccagctgcagacttctttcagtgagcctcgtcttctcatcgttaccgatcccagaactgaccaccagcctattaaggaaggtgctcttggaaacattccaaccattgcattctgtgacactgattcaccaatgcggtatgtcgacattggcatccctgctaataacaaggggaagctgagtattggttgcctcttttggttgttggcaaggatggtcctgcaaatgcgtggtgctattccactcggtcacaaatgggacattatggttgacttgttcttctatagggatcctgaagaggcaaaggaacaggaagagggggaagctcctgtggttgattataatccaaatgttgattatgttcctgggcctgtagtggacaattggtctggggttgattatccaccccaagct

SEQ ID NO: 754 - DNA, 385 bp, Lilium asiatic
cggacgcgtgggtttttttttttttttttttttttttttttttttttgttttttttttttgtttttttttttttttttttttttttttttttttttttttttttttttttttttttttttttttttttttttttttttttttttttttttttttttattttttttttttttttttttttttattttttttttttttttatttattatttttattttattttatatatataaaaaaaaaaaaaaaaaaaaaaaaatttattttttaaaaataaaattataaaaaaaaaaatatattttttaaaaattaaaaaaaatattaaaaattaaaaataattatataaaaatattaattttaaaaaaaaaataaaaaattttttttttaatt

SEQ ID NO: 755 - DNA, 415 bp, Lilium asiatic
accgtgcaatatgtctcgccggtctcgaattctaagtttgcggctcatattctctctctcagggctggatcgacgcatttgggcggggaacttgatgcgaagagggttttgtggacgcagggcaggctgtctgtggtattaataacttaaagtttgcaagctgcaaatctttaaataccaagcattacaaatttagtgtcagcttgattttgcagcaaaaaggctgaacctgtatacttcttgagactcctttttgtcacagatggcaaccaacgaaaatcttacacccaatgtcatcaaacaacttgcgacggaactgaacaatctcgtcgagattccaccctaatgcatcaaagtagtctcaaatgatgataacttctccactatatatgctgatatctaccgacctgctgag

SEQ ID NO: 756 - DNA, 438 bp, Lilium asiatic
cgggatatgaatctcttttaaagatttacagagagaccgatttaagccaggaaaaagaatgtgtcttgggtgttatagcatcatctcctgatccaattgttgttcgcgaagctctggattttctgctctctacggaagttcggaatcaggatgctgttttcggtcttggaggaattggtaaggaagggcgcgagactgcatgggtgtggttaaaggaaaactgggagcacatttcacagagatggggatctggatttcttattgcccgtttcatttcttccgtggtaacaccgttttactctgatgagatagccgaggaagtagaagcattctttgcaagtcgagcaaagccttctattgctaggactttgaagcaaagtttggaaagggttcgtaataatgctaagtgggctcggagtattcggagcgaacaatcgc

SEQ ID NO: 757 - DNA, 436 bp, Lilium asiatic
agaaactagaagtgcattgctcaaagagggcgacttttactttcaatggtcttgattcagatggcactatcacaaaaggaggctattcgaagtacatcatagtcaaagagaggtactgctataggatacctgataactaccccctagctctggcagcacctttgttatgcgcaggaatcacagtgttcactcccatgatgcgccataagatgaaccagcctggtaaatcacttggtgtcattgggttgggtggccttggccatatggcagtgaagtttggaaaagcttttggtttgaatgttacggtttttagcacgagcccatccaagaaagatgaagccctgaaactccttggagcagataaatttgtgatatcgtcggaccagcagcaaatggaggcagcggccaactccctggatttcatcattgatagcgc

SEQ ID NO: 758 - DNA, 320 bp, Lilium asiatic
agaagctagaagtgcattgctcaaagagggctacttttactttcaatggtctagattcagagagcactatcacggaaagaggctattcgaagtacatcatagtcaaagagaggcactgctataggatacctgataactaccccctagctctgtcagcacctttggtatgcgcaggaatcacagtgatcactcccatgatgcgccataagatgaaccagcctggtaaatcacttgatatcaatggggtgggtagccttagccatatggcagggaaattctgaaaagctttaggattgaatgttaccgtttctatcacgagc

SEQ ID NO: 759 - DNA, 433 bp, Lilium asiatic
aaattctccaaagttagctggaatggctggtggacctgaaatccatgatgaaagaggaatagaatgcatgcgagcttctggcaggcttgcggcacgagttctggagtatgctggctcacttgtcaagccaggcataacaactgatgaaattgataaggcagtacatcaaatgattattgacaatggagcatatccttcacctctttcctatggcggctttccaaaaagcgtttgtacatcagtaaatgaatgcatttgtcatggtatacctgattcacgtgcacttgaggatggtgatatcatcaatattgatgttaccgtatatttgaatggctatcacggtgatacctctgcaacgttcctgtgtggtaatgttgacaatgaagtccagaagctggttgaggtaacaagagaatgccttgacaaggcaata

SEQ ID NO: 760 - DNA, 425 bp, Lilium asiatic
atcatttaacactgatgtttctgatgcctacatggaagacatacaacataaagttgtcccgaaaactgaatttggttttgagtcagcgaaagagctttaccatgtcaaggtgtatgataagtctcgacctgattcgactatctcatgcaattgtactgttggagatggtggtgagctcaaaattcacaagatggagctgaatcctgtgcggcaattgttagtagatatatcttgtctttataaagatatggactttaggttgatgctggttaacaaaaggagattaacaagccctgacgatgaggagaaagatgcaataaataaattaatcaaatctgcaatactagatcctgttgttaaaggggggcttaggtggcctctagggaaggattatgtggctgagaggtttaacatagttggggtct

SEQ ID NO: 761 - DNA, 437 bp, Lilium asiatic
cggacgcgtgggttgctccatctctgaaacatgctctatcgttagtgagaatcctgtttctggccaaatcactgagactgaatctgttgaaattgctatggatgccaacaaggagaatgttccgaatagtacttatttggaagaaatttgtgagaaagccaatctcctacagaaggtcatcaatgattgcggaaatcatcatggtgagagagaaaagagtaagagaacgacgaaacccaagcctttcaagctactaaccaatgaaaggagaattcagagggaagcaaatttggaaaagaacctcaactcagaggctaaaagagagaccgcaacacctctcaggtgcagagatgggatgaagagtaaccaaattggcaaaagagtgcaaaagcctcagcctattgaagctaaagtagctcgcggaaagatgttacatt

SEQ ID NO: 762 - DNA, 394 bp, Lilium asiatic
cccacgcgtccgcccacgcgtccgcgcagccctcccatcgctgctccctctcgcctcctgagacgccatctcaaaccccaaagcatcagagcttccaatggtagaggtgctttgcggtgctgctgcagcagcagcagcaacggcaaaccaggagccagttcagatgagaacgacagtaaagttgttctggatgcatttttcctgggcaaggcttttgcagaggcactgaatgaacgcataggatctactgtgggggaagtattgagcgtggtcggtcaatggcaagctgagcaacacaaagaagtgcaagtttttcaagaagaggtgatagagagggccaacaaagcgaaggagaacgctgcattagaggtaagaggggaacaaactggaatac

SEQ ID NO: 763 - DNA, 412 bp, Lilium asiatic
gttcaaaattagccgacacagtgcagtcgaaagcttcagaaactgcagctgacctgcctggggcagcggttttgttcgaccctactgcgatgccaacgaactccggttcggaacacacaagtggagtggatgtttctgttagagttcctgaatttggtgtcccgaaattccccgagagggacaggatttttggacaagctggatacgagcaactcaagacgggcaggataggagagataatagcacacaagtacttcgtcgagaaaatgggcctctccaatgtgagatgggtgaacagtgaaaccgagacgggattgccgtatgatctggttgttggggattcagaagggagcagacagtacattgaggtgaaatccacaagacattcgagtaaaggcttgtttgagatgtc

SEQ ID NO: 764 - DNA, 407 bp, Lilium asiatic
gttgaaaattagccgacacagtgcagtcgttagcttcagaaactgcagctgacctgcctgagcggctgttttgttcgaccctactgcgatgccaacgaactccggttcggaacacacaagtggagtggatgtttctgttagagttcctgaatttggtgtcccgaaattccccgagagggacaggatttttggacaagctggatacgagcaactcaagacgggcaggataggagagataatagcacacaagtacttcgtcgagaaaatgggcctctccaatgtgagatgggtgaacagtgaaaccgagacgggattgccgtatgatctggttgttggggattcagaagggagcagacagtacattgaagtgaaatccacaagacatttcagttaaggctggtttgaga

SEQ ID NO: 765 - DNA, 440 bp, Lilium asiatic
aaaggaggggaagaagattatttttacaaatgttggcaatcctcatgctttaggacagaagccactgacattccctcgccaggtggtagcactgtgccaggctccttttttactagatgatcctaatgtgggtcttttattcccggcggatgccattgctagggcgaagcattatctttcgttaacttctggtggtttaggtgcttatagtgattctcgaggtcttcctggaatcaggaaggaagttgcagattttattgaaagacgtgatgggtatcctagtgatccagaactcatatatctcactgatggtgccagcaaaggtgtcatgcaaattctaaatactggtatcagaaatgacaaggatgggattttggttccagttccacaatatcctctttattctgctgcaatatccttatatggtggttctctcggtt

SEQ ID NO: 766 - DNA, 376 bp, Lilium asiatic
gtcgccctcgccgccgaagttcgctgccccagcgatggcgaagtcgaagaaccacaccgcggacaaccagtcgtacaaggcgcaccggaatgggatcaagaagccccgcaagcaccgccattcctccaccaaggggatggatccgaagttcctgaggaaccagaggtacgcgaggaagcataacaagcagaacggagcttctgggtctgaggaggagatgcagtcatagattggttaagtgtctcaactgttttatctaggctatggaggataatgagtttctgttgtttggattagggttttgatgactctttggatattaagttctgttttggttcgacctatttcagcttaattaaaagttacttttggattt

SEQ ID NO: 767 - DNA, 424 bp, Lilium asiatic
cggacgcgtgggcggcatgtgcttttgaagaagctgagggatatgttggagactctgagggggcgagtggccgggcggaacaaggatgatgctgaggaggctatatctctggtcgaagcgttagcagttcagatggctcaaagagagggcgagctgattcatgaaaaagtggaactcagaaggctagcaaccttgttgaagcagacatctgaagacgccaagaaagtggttgaagaagaaagggcacttgctcgtacagaagttgaaaatgccagagcagcaatccagagagttcaagaggcccttaaggaacaagaacaaacctatggaagcacagggaagcaggagttggaagaattaatgaaagaggttcaagaggctagaagaatccaaatgctgcatcagccaagtaaggtaatggata

SEQ ID NO: 768 - DNA, 426 bp, Lilium asiatic
gagtaggaggaaaggggaggattgggtggattgggaggataagattctggaggagactgttccgcttgttgggtttgtgagaatgattcttcactctgaaaagtacgaaagtggtgaccgactcattcctgagcatgaaaaaacagttacggaaaagttgcttccatatcatcctgagtatgaaaagaagataggatgtggaattgatttcatcacggtaggataccatcctgaatttgagaattcgcgatgcttattcataatgaggaaggatggcgagctgatcgatttctcgtactggaagtgcataaaaggcctgataaggaagaactaccctttatatgccgatagcttcattctcagacattttccaaagagtaagcaatcagattgaagagaacttgctaagaattttcgtacttgtac

SEQ ID NO: 769 - DNA, 165 bp, Lilium asiatic
atctttacaaatttcctcaatcctttttctttaacacacaagggactttcatacgctcactaaatgataacactgtaccactctcattttttactatatcatcctaatgtcaaacttctatttcctacaaataccatttctaattataatcattatctttaatta

SEQ ID NO: 770 - DNA, 427 bp, Lilium asiatic
ccacgcgtccggaataatcatcaataaaactcacatagtaacaaaaaccaaagaaagaagcaatattagcttgtcccaatgtggtcaaacaaattattggaggtggattggccgattgaaaatcgaaaagtagtaaatttagccatattgctagtggtaatgcaacccagaatgacggacttatgagtacaagtcttggacttgccatatgtcctaagtgtcgatgccaaatctcggtagtagacatagaagaaacggggaaaaaacggagatgaataaaaacggaaggaacatgcaagtagtctagataatagagattcctccgcttaaaatcactgccaattgtccggcccgagcgtggatcctgcacaacacaagcaatagaatataagaaaactgtaaattccaatgtgtagaggcatcccac

SEQ ID NO: 771 - DNA, 440 bp, Lilium asiatic
ctcatcagaaaatcttgttattgcctttgtcgaggcaatagagaaagcagaccagtatatggatttcaagaaatatataaaacgagagggttacataaagactgacagtggccgagactgcatctttgataacttagttcagagttcaatacggaaggagctatttgagaagattgataatacaattatccagaatgctataaatgcacgcatttgtgaagtgaaagtagctcaagaaattcgtagtaaatacgaatatcagaaacatcttatccgctgtgactttatgaagccaaatagcagcattgaagatgatataaaagcaattggccaatatgacatgtttccaggtttgagttatgatgaaatgataggtgaacttaagcattacaaaaagtttattatgttctcacccactcaaaaagctatggcgaactata

SEQ ID NO: 772 - DNA, 451 bp, Lilium asiatic
gtccattggtcttgagacactgggtggagttatgacaaagattatcccaaggaacacagcactgcctacctctaaatctgaggtcttctctacagcagctgatggtcagacgagcgttgaaattaatgttcttcagggtgaaagagagtttgtcagggacaacaaatcccttggcagcttccgccttgatgggatcccgcctgctccccgtggtgtcccacagattgaagtcaaatttgatatcgatgccaatggtattctctctgtaactgctgtggacaagggtactggaaagaaacaggacatcacaatcacaggagctagcaccttgccaagtgatgaggtggagagaatggtaaaggaagccgagagattttcaaaggaagacaaagagaagcgtgatgccatagacaccaagaaccaggctgattctgtcatctaccaaacagaa

SEQ ID NO: 773 - DNA, 360 bp, Lilium asiatic
gatttttacacggcgtatataaaatgcacaatatgctcttgcatgtgcgccccagaaccctatgtgctctctgtaggtaatgacaccttatttgtcttgtggagcatttacgatcatatatctgcattatgagaggccaccacatatcctgcggcttcatatggcgcatctggaggtaagcactcaccacaagctctaagtgacacaacttctgagagccccacaaatgcagcacgccgtgtttttcaagagcgttctgatacccccgaagatatgcacattgctccctctatttcacacgaattttgtagcctatgtgatgatactcgtgttattctttgtgatactcctgtaggctca

SEQ ID NO: 774 - DNA, 280 bp, Lilium asiatic
cactcgtactctcatgcacacaatcttcttattgcctttatttaacaatatatatttcataccaacatatgggattattaaagaatttaactagagccttacatatagactgactattgcctatacttcatcctttataacttacttcagacttcaatacagacatatctatttgacaaaattgactcctacaatacatccataatgctatcaattcactcactttccatatgaacctaatctcaaaacattcatatttaataccaatattaaaaacatc

SEQ ID NO: 775 - DNA, 428 bp, Lilium asiatic
  modified_base (301)..(301): a, c, g, t, unknown, or other
ggcgactggatcccctggatatcgggggagctacgatcgctctatccccgatccctttttcgtaggtcgcaggagttttgctaaaggaaggaaatcgaaggatggagatgatggtgatactgtccaagttgttcctgatattggaccagtagtgaagtcagcaactctctcacaaatggatgctgcaattgttgctttatcaagagatttaggcaaactacggacgggaagggcgtctgcagggatgcttgatcatctcattatagagacaagtgctggaaaaacgcccctgaatcatgtntgctgtgtttctgtcatagattcaaagaccctctctgtgacaccttatgatccaagtgttttgaaggcggtagaaaatgcaattgtctcgtccccattgggtttaaatccgactcctgatggcgagc

SEQ ID NO: 776 - DNA, 426 bp, Lilium asiatic
gtctatggtagccgaagccctccagctctaagggatccttacgctgcatactcaccagaagtggtaccttctgctgttcttggatccccatactcccctgctccaatgcactatccaccctatggtgggtacaccaacggaggctacaacaatgttctgtcacctggatatcaaccgtcacctggatatcaaacggcttactaccggtaggatcgatgctgataccttgacaaaatggtaactctgatgacacggtcactcgccgaatcgcctattttgtagtgactaactacaatagtaggttttatgttgtgtgtgcttatgaatagttggactcttgtaacttctgtttaggtcaatgtgttgtattatgtgtttccttcatgtaagtaagtgacttaatgttgaagagaatgtttaattctc

SEQ ID NO: 777 - DNA, 417 bp, Lilium asiatic
agcacagaccagtcgaacaactcagttgtcccatctcctccttgtgatgataaccctagcggaagacttcatcagcttccgaggaatgagccctcctccgtaaacccaccacagccgatccccatgactcctgaaaacaaacaaactggttggtgttacccctctgcaaatcactggttggttccggttatgtcgccttcagaaggactcatttacaagccatatacgggcccttgccctccagcttctggtttcatcgcccctgcttatggaggctccataccaatgagtctgcctcctgtagcctatgacgcctctccatcacaccaccaatctgctgttcccgttgcccctacaattgctccaaactattttccgatgccatacgggcttcctttcgtgaaccacaatgcctct

SEQ ID NO: 778 - DNA, 182 bp, Lilium asiatic
gacccacacatcctatcacttaccataccatcaactcatactactttaactcctccttcataggataaccctaaaagcatacttcataaacctacaagtactcaaccctccttccatatcccaccacaaacaatccccctaactccttcaaacaaacaaatcttacaaattttacccctcta

SEQ ID NO: 779 - DNA, 470 bp, Lilium asiatic
aattccattctcgacggcaagcgacccgttcagaactaacctgcacattacaggggatagcttaaaagcctgcttctgacctgcctggttcgagttataaccctatactcctactgttgatgccaacacactctagttctgaacacacacattgactatctttttcctgtatatttacagaacaccatatctcctaattcttcatgaggcacatcattatgtaaccagcttcatacaaccagctctaacacaacttcatagagcagataatttcacacaagtgcttctttaaaaaactttatcattccaatgtaaatttgcagaacagtgaatctaagacacaataatcttatgatctaggtgatgatgattcagttattatcagacattacattgttggctcattcacaatactctccggtaaaaactcgcatcaaatttatgcttaactatttcattttaacccctca

SEQ ID NO: 780 - DNA, 409 bp, Lilium asiatic
ctggagagggctagtgaggaatctctgttggggcagggtctcaaagttcttgatacttcgatggagagctttgctacgggagcgtggcaggctttcggcactgcttggaagggaggctccactctggttcataagctggagaactctgctgcaaaccttgccgattccattcaacacagcaatcttcctgagaaagccagttctcttgccccatctattatagagagaggaaagtcttttacggccaaaggagtggaagttcttgagcgtgttggtaaagagacaatggatctgcttatagcagagacgggtcttgaagttgataagggcactgaggtagatcaacaaattgagtttgaggaagttacatttgacagatgcttttatatctatggaggaccggaacagc

SEQ ID NO: 781 - DNA, 221 bp, Lilium asiatic
ggtaattctgataaccgcactttcaagatcaaactttcattttgtgccaaaaaaattgtacccaattgattcacggccattatttgacaagtttcttgttgccgcaagacttataaaccttttcttaaagcttgaaattcctattacaaataccgcgttaaaaagaaccttcttgccaatgtccctggtgtttccattaacccttttgagcattcccattg

SEQ ID NO: 782 - DNA, 356 bp, Lilium asiatic
cggacgcgtgggtcatgttggggatcgcggggtgcttgctagggcgtcgggggattatgcgattgtcatcaggcataatcctgataacggcacttccaggatcaagcttccatctggtgcgaagaagattgtaccaagtggatgcagggcgatgattggacaggttgctggtggcggcaggactgagaagcctcttctgaaggctggaaatgcctatcacaagtaccgtgtgaagaggaactgctggccgaaggtccgtggtgttgccatgaaccctgttgagcatccccatggaggaggtaaccatcagcacattgggcatgcttcgactgtgcggcgtgatgcccctcctgggc

SEQ ID NO: 783 - DNA, 428 bp, Lilium asiatic
cggacgcgtgggggcggagctggatgcgaagcttggggcgatggggaacctggttcatgactctgtcccggttagcaatgatgaggctaacaatgaggtggttcggacgtggggcgataggaggatggaagagaagctgaagaatcatgtggatctggtgaatctgcttggtattgtggaccttgaaaaaggcgctgatgtagctggtggaagagggtactatctgaaaggaatgggtgttgacctgaacatggcactcataagctttgcactggcatttttgaggagacgaggttacgagcggatgcaaaccccatttttcatgagaaaagaaattatgggcaaatgtgcacagttggcccaattcgatgaagaactctacaaggttacaggtgagggagatgataagtatctcatcgccactgcag

SEQ ID NO: 784 - DNA, 426 bp, Lilium asiatic
ctgatcttccctcgactcatcccattcgactcgggcttgctctcaatttctcagtcttctattatgaaatcatgaattctcctgaaagggcgtgccatttagcaaagcaggcctttgatgaggcaattgcagaactggacaccttgagtgaggagtcgtacaaggacagcactttgattatgcagttactgagggacaatctcactctttggacttctgacttaccagaggatggaggcgatgatggtttcaagggcgaggaggccaaagctgctggtgatgatgagcactagtaatgactgcttttaactcccgtcttggagatttctagtagtggcggataatggctgagcaacaaacttcaagtgggtttttctggttcaatggaagggattccattttatcaaatttatggtcctgtttagt

SEQ ID NO: 785 - DNA, 415 bp, Lilium asiatic
cggacgcgtgggttgaggagcatctctaaaccttctcggctgaagtcttcaaatggcttgggggcttctgcaatggctacctacaatgtgaagcttgttgggccagaaggggaggaacatgagtttgaggccccagatgacacatacattctggacgcatctgatcttgcatggttggagctgccatactcttgcagagctggggcttgctcaacctgtgctggtcacatggtgtcaggtgctgttgatcagtcggacggatcattccttgacgaggcacagatggaaaacggttatgttctgacttgtgtcacctattcaactgctgattgtgtcattcacactcacatggaaggtgacctgtattaatgactcaaccaggttagtatgtgcttatggatcttaaaaagacttt

SEQ ID NO: 786 - DNA, 442 bp, Lilium asiatic
caagaggcagatatcgttcttattcacgctccccttctcccctgcctagacgtgactcaggggaaagagagcgggatgagttctattctccaaaaagattggtctctccaccccctaggggtgataaggctcgaaggtctcccagtcccaaggcagctggacgtagcccatccaggtcgcgctcctatagcccttagtgatcaagggctcagttggcggtgtaagcagtggtttggttgctagacgttaatcttctgtcaagtgttaggaactgtgttttcaagtgggttcatcaagtattgggtactggaaggtttttagcagctgttacatgtatgaattctttgttgggatctctggcacaagtattaagtactggaagtcatgttatggcaagtcttatgatgtgagcatctatatgccaaatttgactatgtagttc

SEQ ID NO: 787 - DNA, 446 bp, Lilium asiatic
gccggagctctccgccagagctccgccggtcgccaccgccgcccccctccgactccaccaggagctaccaaatgttcaccagaacaccaactcctccgcctcggtccattcccaccatcaatttcagtcgattcccactccaacagtaggaatgatcaattctagttcttaatctccaacggatctcccagaaatcatcttctccagcaaccccctcaccttcaagcacctccagagagatcatggttatatcaagaattctcagtcagagagggtattgttcgagttctccgatgtagcaaagaaagatataaaccagaccgagtgacatttctttgtgtgcttccggcttgtgctgatctgtccgcattgaagctagggataagttgcaaatgatgtttaataaggatgagtggcatgatatttcgtggaattctttgattttt

SEQ ID NO: 788 - DNA, 438 bp, Lilium asiatic
  modified_base (372)..(372): a, c, g, t, unknown, or other
agactttccatagctgagatggagaccggatccaaggctaagaagggagctggaggccgaaagggcagcagcggaccaagggccaaatcagtgacccgctccatcaaagctggcctccagttccccgtcggcaggattgggcggtacctcaagaagggccgctatgctcagcgtgttggctctggagctcctgtctaccttgctgccgtccttgagtaccttgctgctgaggttcttgaattggctggtaatgcagctcgggacaacaagaagaaccggattgtacctcggcatgtgtgcctggcggtgagaaatgatgaggagcttggaaggctgttgggtggtgttactattgctcacggtggagtcctncccagcattaaccctgttctgctgccaaagaagactggcaaggaagggactgagcccaagtcccca

SEQ ID NO: 789 - DNA, 288 bp, Lilium asiatic
agacgttccatatctgagatggagaccggattcaaggctaagaatgtagctggaggccgagaggtcatcaacggaccaagggccaaatcagtgacccgctccatcaaagctggcctccagttccccgtcggcaggattgggcactacctcaagaagggccgctatgctcatcatgttggctctggagctcctgtctaccttgctgccgtccttgagtaccttgctgctcaggttcttgaattggctggtaatgcaactcggtacaacaagaagaaccggattgtacct

SEQ ID NO: 790 - DNA, 425 bp, Lilium asiatic
cggacgcgtgggcaccatcaccgaggagcgagagagagatgagaggatgcgccaccaaaccgaatgtgatggtggaggctgaagtcgaagctccactgccgctcaaggagccatcggctgccgaagagagggcggcggaggtggaggccgtcaccggcaatgaaccagaacagcctggtagtagtctctcagcttcttgttgaaggaggtacagaagggccttaagaaggaggctgtttccagaagtttgtggagaagaatatggtcaaataatgaaattttctgggagaatacaatgctgaaaattgaaatggaaaatatcaaattctggtatgacaattcggccacggagaacccttttacacaacttttcccccaaatcttttagaattttactcaccaaaaaggtataatttatgagttat

SEQ ID NO: 791 - DNA, 429 bp, Lilium asiatic
ctccggcgatggccgacgcttactggaaccgccagcagtccgtccaccattcgtcgccgatgccgatggcgaagcgcccgcgcactgactacgatctcccatatggtgttactcctcgtcaagatagctttcagcacttacctagagataataaccgtgctggacatccaactgtgaaggatacaaaatctattgaagaatcatatgagcggtacctccagaattcgcaacatccttcttttggttctggagagcctagcaattttagtggcactggagcaggtaagcatggtggagggatgccaactgggggagtgcacagttttccttacgaggatgtgcacagccttccttatgggcattcagctgtgataggtcgtccgggtcctaggactattatcccagacatgatacctaatgaattgggca

SEQ ID NO: 792 - DNA, 427 bp, Lilium asiatic
cggacgcgtggggcccgatcgaaaagagttcacgaaggtggcgttctggacggcgatcggattcgtggtgatgggaatcgtcgggttcttcgtgaagctgatcttcattcccatcaacaacatcatcgtcggatctggataggtataaaggcttttatgaatttgttaaatcaaaaggagtagacattggcatgcctcttggcctagacgtacttgttgatgggattgttcctacagggtctggactgtctagctcagcagcatttgtctgctctgcaacaattgctataatggctgtatttgatgtgaatttccccaagaaagtaatccctcaactaacatgtgactgtgaacggcatattggcacacaatctggtggcatggaccagtgtcctagacagcaaaacggtgttgactgtggatatta

SEQ ID NO: 793 - DNA, 312 bp, Lilium asiatic
tcttcatagcaaaatcgcctattgtctggaccttgctattacatcatatggataccttcttctacaattgctcactacacaatattcttacatgccacactctgacacacaactctattatctacttcagacgaacacaagcccctaactcaatccttaattctaagctcactgatccaatactgacttactcacctatattacctcattcctacataaccagcactttcactgctcctacagaaagcctttttaacgatctacattcaatcttatacaacattaactatgagcctttaaagcactatccca

SEQ ID NO: 794 - DNA, 420 bp, Lilium asiatic
gcagaatcggaggtcctctcgaaatacccgagaacaggtgttgtcctaagaccgggctttatgttacggtaaacgaaaagtagacggcttcgagatcccacttgatgtagtaggagaaccattgcagaagctgctgcttgctgctgaaaattttacgaagcccttggcctcaatccccgcatcagatctcttcttggcaccccctgtaagcgtcgatgatgtcgcctatgcagtgatcagtgctgttggtgacgacgatttcttcggagttttcacaatcgagcaaatcagagaagctgcagctaaggtccggacatgaatgacgaattagggatgcttccctgcttcgactattctccaactccactttctgtctgagttgttcgacatataaagatcttagtcttggatgtgcgctct

SEQ ID NO: 795 - DNA, 343 bp, Lilium asiatic
gcgtacgtcacgcgtccggaataatcatcaataaaactcacatagtaacaaaaaccaaagaaagaaggaatattagcttgtcccaatgtggtcaaacaaattattggaggtggattggccgattgaaaatcgaaaagtagtaaatttagccatattgctagtggtaatgcaacccagaatgactgacttatgagtacaagtcttggacttgccatatgtcctaagtgtcgatgccaaatctcggtagtagacatagaagaaacggggaaaaaacggagatgaataaaaacggaaggaacatgcatgtagtctacataatagagattcctccgcttaaaatcac

SEQ ID NO: 796 - DNA, 416 bp, Lilium asiatic
  modified_base (407)..(407): a, c, g, t, unknown, or other
gacagtttaatgcagagaccgagtatactgttactcaggcaatttctgcgcatgaagcaggtgggaggaacaataattggatgccccctccttgggcaattgtcgcgatcctcgtcttggggatgaatgaatttatgacacttttaagacaacccttctatttcgcagtgatacttgatgtctttctgttgggcaaagccctctgggttcagctaaatatctctggcgaattccgcaatggcgctctacctgggatcatactcttgtcgacaaggcttttgcccgcaataatgaaccttcttaagaaattatccgatgcaggccaagcgtctgcagctccggaaccccaaagaaaccctaaactggagtcaaacagttttgtgagtggtgtgtatagcaactttagnttcgatgca

SEQ ID NO: 797 - DNA, 364 bp, Lilium asiatic
gtaccggtccacccacgcctgctcgaacacgcgtgcggacacgcgtgatcggaactgccagatggcatggctccggaggtgcagcacgctatgcatgcacaaatactctatggtctggaggtggatattacgtcatatggttgccttctgtcagaaatgctcactctacaatgttcttacatgccacactgtgacacacaagtgtgttatctccttcagacgaaccagatcccgatgctgacccctgaactggaggcacttatatccgacactggcgtcagtaccgatattacgtcattcctgcaaaaccagcgcaatgactgcaccgaaggaaagcctgctaaacgaccgacggtcaaatgta

SEQ ID NO: 798 - DNA, 441 bp, Lilium asiatic
aaaaatttgaggaaccgactcaaaccaacaaaggtgcccagatgagaacaatcttcggagtgtcatcttaacataagtgggtcctagtgttgggaccctagtccaagaaagtatgagaactgatatagaccagattccgtagaacaaagttgatgaattgggcttaggattgggaacatccatgactcaggaagtacgaaatttgtaagcctggttgatcttccacctttctcacatgttatacttgatgaacttcccctctcaagttccagattcccaaagttctctatgtttgatgggcatgactggtcaaaatttcacatcttgcatgtcaagctcatgatggggttacattcagcctctaatgccatgttgtgtaacatcttctttgtcggcttatcggaggggcaatgtttgacaaactaaaaccaactaatatat

SEQ ID NO: 799 - DNA, 428 bp, Lilium asiatic
gctgcttatggtgatgttgttgagtcaaaggctggtcagggagtcaagctattgaacatcgtcacaaaatattgtgaagttttctcttcaatggtggaagggaaaaatgaagatacggccaatgaactttctggtggggcacggattcactatatcttccagtcaatctttgtgaagagcttagaggaagttgatcctttggatgatgtaactgatgaagatattcgattagccattcagaatgctactggtccgcggtctgctttgtttacccctgaggtaccatttgaagttcttgtaagacggcagataagtcgtttacttgatccatgcctccaatgtgcaaagtttatctacgaggaattaattaagatgagccatcgttgtctagctagtgagctgcagttatttcctgttctcagaaagtg

SEQ ID NO: 800 - DNA, 433 bp, Lilium asiatic
cggacgcgtgggtttttcatgtgagtacataccaataaaactaaagacgagatgaatgacgtaggagacgagggcgtatgtgagagaaccaaaatccagaaaggcagcaaaggaaaataggaataaccagcaaaggaaaataggaataacgatgctatatatatatatatatatatatatatatacttcaatttttcatgtgagtacataccaataaaactaaagacgagatgaatgacttaggagacgagggcgtacgtgagagagagaaccaaaatccaggaaggcagcaaaggagaataggaataacgatgattcaacggtgttgtaacataaggaaaatgatagtttaaccaatgcaagagcagactaatacattaggatttgtgatggattttgacacgtgggtaaaaaaaaggcatgtgctgagatg

SEQ ID NO: 801 - DNA, 433 bp, Lilium asiatic
caccttgagtcctcccgccgcgcgctctcaccggcggaggttaccgcgcttgttgactgctgcacggatctcctcaaacgctaacttccgcatagcgcaggtcgcgctgcaagctctctccaccgccgccgtgatctccggcgagcatctgaagctccacctcaacggtctcgtccccgccgccgttgagcggttcggcgacgggaagcagcctgttcgcgatgccaccaggcagctcctcatcactctcatggaggtctcatcgccgacaatcattgccgagagagtggggatgtttgcgtggagacacagaaactggagagtccgggaggagtttttgcggaaagtcagatcggccgttggcctctcctctaccgagcttccgcctcagcgagctctacttcctcatgttttagagttgttgtatgacccc

SEQ ID NO: 802 - DNA, 419 bp, Lilium asiatic
ggggagcatgtgaattcttcatctcagggtgattcagatgtcgtagagtgcagaaactgcgggcattatatatcaagtcgcaccatcttgctacatgaagcattctgtaccagacacaatgctatttgcccatatgatggttgtggagttgttcttaggaaagaagaactagggaaccatgtacactgtggtaagtgtggaagggcctttcaacaggcggagatggaaaaacacatgaaggtatttcatgagccgctccattgtccatgtggggtgatcctagagaaggaagaaatggtggagcaccaatccttggagtgcccgttgcgtttaatcacttgtaagttctgtggagacatgggtcatgcaaggagtgctcctatggatgcaagggatcgtatgaaggggctgtcggaaca

SEQ ID NO: 803 - DNA, 446 bp, Lilium asiatic
  modified_base (370)..(370): a, c, g, t, unknown, or other
acgcagtctttcatctttatctggtttccaccaatcataccacttatgataacttccgctacggatgggataggaagattaaccctttcaaccgcggatgtgctctaaatatcaaggaaatcttcttctcacggatccctaaatcgaagaacgacttccgatctaaagttaggaatgactctgctgccttcaccgcgtacctctcgcttggccgtatcatgagccccgatatgtccaagacaagctaggatctcgagatgggtgggaaacgacatgctgtagccgaagaggatcttgaagatatacaagaccagatcgagagcttatcggtgttggagcgatgtggtacgctaccgttacactcagactngtgcagtcacaagaattgggagacggtatccgatctcgaaatgctggctgctgagtttggaatggaacatggattc

SEQ ID NO: 804 - DNA, 395 bp, Lilium asiatic
ttgcaatctctctcgccggtctcgaattcgaagtttgcggctcatattctctctctcagggctggatcgaggcatttgggccgggaacttgatgcgaagagggttttgtggaggcagggcaggctgtctgtggtattaataacttaaagtttgcaggctgcaaatctttaaataccaagcattacaaatttagtgtcagcttgattttgcagcaaaaaggctgaacctgtatacttcttgagactcctttttctcacagatggcaaccaacgaaaatcttccacccaatgtcatcaaacaacttgcgaatgaactgaaaaatctcgacgagattccacccgaaagcatcaaagtagtcttaaatgatgataacttctccactatatatgctgata

SEQ ID NO: 805 - DNA, 386 bp, Lilium asiatic
gcaagaggctaaactccagtgacatcaacacccaggttatggctgctaaaatttggactacctgggagttgatgactgcacatcttgttccgaatgaagagaatatcagaaagggggaagatgacaagttctcattgggctggcttgacagtgacccaagcgttggatccctgccctccaggattttgggtgcgggccatgcgagctaaatcggggtggttttccccaagatccgtggggatttacttgcagaccctcaacaattctatatttgtcatttttttttgtcatggcatttgcaaggattgaaaaccattactttgtgaacaaagggtttctgtcctcggattcccatcttctagataacattgattagatacgacata

SEQ ID NO: 806 - DNA, 327 bp, Lilium asiatic
cggacacgttgtcctacacgtacacgacacccgaagatgtatgagagatccgattgactgggttattgatgccgtgtgctcatcaacgagcctcctttcttgctcttagaatgtgtgacgaggacttattataatcgggcttgctgactcgtactcgagacttggatctctcggctgattgagtcgatgcatagtactctccatccttgtcaccctcattggccactatatcccaatgtacggactacttgtgaccgtgcaatcagatacttgcactaccgctccaaccacatgcgatgacagtgtgacttgcaccctgatctacac

SEQ ID NO: 807 - DNA, 299 bp, Lilium asiatic
catcaacactcaagttatggctgttaaaatttggactacgtgggaattgaggggtgcacatcttgttccgaatgaagagaatatcagaaagggggaagatgacaagttctcattgggctggcttgacagtgacccaagcgttggatccctgccctccaagattttgggtgcgggccatgcgagctaaatcggggtggttttccccaagatccgtggggatttacttgcagacccttaacaattctatatttgtcatttttttttgtcatggcatttgcaaagattgaaaaccattactt

SEQ ID NO: 808 - DNA, 442 bp, Lilium asiatic
gattggagtctggaccttcatgttgccaagaagattgtggaagtggagaggcttcctaggggtccacatcagatggtccttgagggcggaagcattcatgtagacggagaaggtacttgcataacaactgaagaatgcttgctaaatcctaatcgcaaccctggtatgacaagggagggaatagagaatgaattgaagatgtatcttggtgtcaaaaaagtcatttggttgcctagggggctctatggcgatgatgataccaatggtcatattgacaatatgtgctgttttgtgaaacctggtgtggtgcttttggcatggaccgatgatgagtcagatcctcaatatgagcggtcagcagaggctttgtccgttttatctaatgttaccgatgcagagggtagacaaataactgtaatcaaacttcacgtgcctggggggg

SEQ ID NO: 809 - DNA, 417 bp, Lilium asiatic
  modified_base (360)..(360): a, c, g, t, unknown, or other
cgagcttggaagcgactttgaagtcggtggagtcctgcatctccggcgccaaatggcgcctgaggccctcatcacggcgccgccttcaaacagatattcttgctctgtgcacgggattgcgggcggtggtgctggttgattatggaggaaagatgccggaattgcaagagcgtacttgtgctctagtgcgccttcttcatcttgagtccactgttctgcttcccctgagagtaatggtcatagaagatatgatttatcttgtgcatgttaaaggacttgctgaactggcatcattgagtcttagttccgatcacaagctttttcttgtggatctcgaacacgatcctcttaagatgttgntgcatgcagaacaaaacacactgatgtctgaccttttgtcaattcagaagtattttc

SEQ ID NO: 810 - DNA, 449 bp, Lilium asiatic
gcagatcgcgacgtgcgggtgttccgatcaggagatccaatggaccacaacgagacaggatgcggtgctcctgaagcaccgatcttctgtgtcaacaactgcggtttctttggcagtgctgccacaatgaacatgtgctccaagtgtcacaaggatcatgtcatgaagcaggaacaagagaaacttgctgcatcctctttcaatagcatcgtcaatggcagcagcagtagcagtgcaaaagagcctgtccttcccagtaaagttggtgttgaagtcgagccggtagagccaaaaaccttatcagcacagccgtccaatacttctgtctcaagtgaaggtgctgagccgaaggctcagcaaggcccgaacagatgcaatgcttgtcagaagcgggtttgggggaaaatttttgggggaaaaattttgtggggggtgggggtttttttttt

SEQ ID NO: 811 - DNA, 365 bp, Lilium asiatic
cctaaccaaactacactcactagcctgaattcttccactcatcataaatcctcagaccaggtctgattttatcgcatggcctatcataacctataatttttagcaaacccgtccatcattagtcatcttctcatgcactctctcaattctaacatctattaatccatttaccatccttaaatactccttaattatatcgaaatactaataaatcttctgatctctttcttcacatcagcttaaatctacaatacatctcaatgacacactattatactaatgtaatgattatgagtaatacacactactccatcatatcattaatgaagatacgagactttcaaattgatcacattagtttctac

SEQ ID NO: 812 - DNA, 59 bp, Lilium asiatic
ccaacttctaagctactttcaagtcaccatattcctacatctcccactccaaataactc

SEQ ID NO: 813 - DNA, 469 bp, Lilium asiatic
gaggaagagatcattccagggcaaccactgccccctgaatgccatgctgaaccacatactgattataaaggcgttgctgtcagatggggtcttacgcaccataaaaatagtgctgccgactgttgtctggcctgcttggatcaggcgaatcgtacaaagtcagggaaactgaagtgcaacatctgggtttattgcccaagtgaagcttggtgctaactcgcagatatctattaaccataagcataagaatgcttggtggaaccagcttcgaattccgaagtggacctttaaccccaattttccccattggacccgaaattttaacccgaaggcacttgaagtggtccttggaatttcaggcgttgttagcgggtaaccacagaacctttcatttgccgtttaatctaatactctcatgtaaagctatcaacagaccatcgacaaattactctcttcaaatatgggcctg

SEQ ID NO: 814 - DNA, 299 bp, Lilium asiatic
cggacgcgtgggcttgcggatagcaatgagagggagtatgaggaaacgaataatcaagggtaaatacaggtacatgcaggttctttctcacctcttctccatgaatgatgaatagctatggaaggaggcctgtggtcaaatgtgaatctatggctggaatgtgaatggaaatatattgctggatgaaggagttgatagagcttagtagtagtagtgttgatggcttggtaacaaaggtatatagggcagtctctgtatggtattagctgcttggagttggccatggtgttaaagagttg

SEQ ID NO: 815 - DNA, 440 bp, Lilium asiatic
acgctctctacggttagggtttcccctcttgcagtgatctcgagaagccgatcaccatggtgagttgcataatgatgtggtgaaggaagcaattacttaggttactggtgatgccaaggacaagaatcgcaagttcacggtaactattgagcttcagattggtttgaaaaattatgatccgtagaaagataagcggatcagtggatctgtgaaattgccccatattccgaggcctaagatgaaggtctgcatgcttggtgatgctcaacatgttgaggaggcatagaaaatcggattagactatatggatgctgaatggcttaagaagatgaacaaaaacaagaaactggtcaagaagcttgctaagaagtatcatgctttcttagcatcagaggccattattaagcagattcctcgacttttgggccctggtcttaaca

SEQ ID NO: 816 - DNA, 348 bp, Lilium asiatic
  modified_base (338)..(338): a, c, g, t, unknown, or other
tagtgattgctgcccttgtatagatcaagacgctcgaaaccgctaaagagggggggcttgttgacttaccaaatgcaaccattccaatgagcttgtggtggttagttccccaatatgttctatatgggatttcaaatgtgtttacgatggtaggactgcaagagtttttttacgatcaggtgcctgattcattgaggagccttgggcttgcattctaccttagcatcttcagagtcgggagcttcattagtagctttctggagtcagtgatcgacaaggcgaccagaagttcatgcgaaaattggatctctaacaatctgaaccgtgcgcatcttgantacttttact

SEQ ID NO: 817 - DNA, 316 bp, Lilium asiatic
ctgacgcgtgggcttgcggatagcaatgagagggattatgaggaaacgaataatcaacgggggatgcacgtacatgcaggttctttctcacctcttctccatgaatgatgaatagctatggaaggaggcctgtggtcaaatgtgaatctatggctggaatgtgaatggaaatatattgctggatgaaggagttgatagagcttagtagtagtagtgttgatggcttggtaacaaacgtatatagggcagtctctgtatggtattagctgcttggagttggccatggtgttaaagagttgaaggaagcttgtggcta

SEQ ID NO: 818 - DNA, 304 bp, Lilium asiatic
cgggatggtcctttcaatggtttcgatggtgattgctgcccttgtagagatcaagaggctcgaaaccgcgaaagaatttgggctggttgacttaccaaatgcaaccattccaatgagcttgtggtggttagttccccaatatgttctatatgggatttcagatgtgtttacgatggtaggactgcaagagtttttttacgatcaggtgcctgattcattgaggagccttgggcttgcattctaccttagcatcttcggagtcgggagcttcattagtagctttctggtgtcagtgatcgacaag

SEQ ID NO: 819 - DNA, 385 bp, Lilium asiatic
cggggcagttttattttcccttttgcacagccagctccccaccacagtttctcagaggaggtcgctgtgctcgacaaatacttcggtcacctccagtctggtggaaatgcttacatgattggtgatcctgttatgcctgaacgcaactggcacatctattatgctactgacaagcctgagaagcccatggtgactcttgagatgtgcatgactggcctgagcagcgacaaagcatctgtcttcttcaagagttctgctgatggccacactcgctcggccaaggagatgactaatgtttctggtatctcaaacatcatccctgagatgaatatatgtgactttgaatttgacccctgtgggtactccatgaatgggattcatggtt

SEQ ID NO: 820 - DNA, 367 bp, Lilium asiatic
gtggagaacaatcacaatatggacattgcactcgttttcgtcgggagcaagatgcactcgtcagatatctcgaaaaccaaacatgtctatccagctttgttagaattgctcaagatttccttcacaagctccaatcactctatggcattcccctatgatgcctcatcagactaaaaggggatgctggaaaattcgctgatttcgggatttatagatagctgtggtcaaggtttttaagcaaataatatcgcatacatggattcttgttcggatgatcacaaatacatcaagaatcttcaaggcatgcattacctcatgaattctgtgggttcaagattggaagcacgggaaagcaaacagactgatt

SEQ ID NO: 821 - DNA, 437 bp, Lilium asiatic
cgggatggtcctttcaatggtttcgatggtgattgctgcccttgtagagatcaagaggctcgaaaccgcgaaagaagttgggctggttgacttaccaaatgcaaccattccaatgagcttgtggtggttagttccccaatatgttctatatgggatttcagatgtgtttacgatggtaggactgcaagagtttttttacgatcaggtgcctgattcattgaggagccttgggcttgcattctaccttagcatcttcggagtcgggagcttcattagtagcttcctggtgtcagtgatcgacaaggcgaccagaagttcaggcgaaagttggttctctaacaatctgaaccgtgcgcattttgattacttttactggcttcttgcggggctgagtgctttggagttggtgctttatctctattttgcgcgggtttatg

SEQ ID NO: 822 - DNA, 303 bp, Lilium asiatic
aggacgagatcattccagggcaaccactgccccctgaatgccatgctgaaccacatactgattataaaggggttgctgtcagatggggtcttacgcaccatatacatagtgctgccgactgttgactggcctgattggatcaggcgaatcgtacaaagtcagggaaactggagtgcaacatctgggtttattggccaagtgaagctgggtgctacttgccctatatttatgaaccttagcatcaatagttcttgttgaaaccagcttcgaattcgcagttgaacctttaacaccaattttcac

SEQ ID NO: 823 - DNA, 342 bp, Lilium asiatic
  modified_base (271)..(271): a, c, g, t, unknown, or other
cgccgaaggatggcaaattgattgaagacgacaataattcaaatcgcgttgtgactgatccatcggttgcgactattaggcattaattcacatccaaagtttggattggttatttacgcgactattaggcattaattcacatccaaaagttgttttgattatttacttagagacgtttgagaaagaaatgtcggggactattaggagttgaattcacatccaaagtttgctttggttatttactcagagacgtttgagaagaaatgtcggngactattaggagttgaattcacatccaaagtttgctttggttatttactcagagacgtttgagaagaaatg

SEQ ID NO: 824 - DNA, 382 bp, Lilium asiatic
tatactgcttatacaacggatcgttttattaccacttttggtcatccatttacatacactgtttggattgtttatttactcgactattatgcattaattcacatccaaagtttgttttgattatttacttacagacgtatgacaaagaaatgtcttatactattatcagttgaattcacatccaaagtttgctttgtttatttactcacatacctttgataataaatttctgttactattacgagtttaattcacatccaaagtctgcttcgtttttttactcataaacttttcaaaaaaatttctttaactattattattttaattcacaatcaaatttttatattaaatttcttctttaaaacaatgtgttttcatggat

SEQ ID NO: 825 - DNA, 278 bp, Lilium asiatic
cagagatagaggtatgtagaatgatataatctgttgtcaaatttttatatataacgatagcatttttaaaaaatgttgctacacaatatatcatataatctaccatagattctgctatatcataccttataactactctctatctcttgcattacctttttatttctcatgaatctcattgttcactcccatgattctccataatattaaccaaccttttaaatcacattttctcatatttttttatgtacttttccatattgcattgaacattttaa

SEQ ID NO: 826 - DNA, 353 bp, Lilium asiatic
ggaaagaaggaagagaagaaaccttcagtagttgtgattcagggcccaaagccagggaagcgcacgtgatctctcaaggatgcgccagatactcacaaagctgaagcactccccgcccacccatatgatgcctccacctgttgtgcccgccaaagatgtgaaagtggcgccggcggcgggaggccctgctgctgccaatgttctcaaggctactgtcaagccttctccggaggctgtagctgttgcttgagtatttgttttactgcttccttctgttttctctatattgtatgtaggtggttatagtgttaagtgtgagactatctctgtctttctggatgcaagtggtatag

SEQ ID NO: 827 - DNA, 427 bp, Lilium asiatic
  modified_base (392)..(392): a, c, g, t, unknown, or other
  modified_base (415)..(415): a, c, g, t, unknown, or other
ggtgttacggatatatttggaaaatgcctacctgttcttgaggagatggtagagcagagtgatgccgttgctggtacacggggaagttacagatccacatgtggacacatttgaccgagaaaaagtcttcattgagactatcttagcgccattgatccagaagcttccaaatctcaaggttgtaatggagcatattactactatggatgctgtcaggtttgttgagtcatgcaatgaagggtctgttgctgcaaccgtgacaccgcagcatctacttctcaacagaaatgctttgtttcaaggtggactgcagcctcacaattattgtctaccagtactgaaaagagagacgcataggcaatctcttgtgtcagctgtcacgagtgggagcnaaaaaccccgggttttttttttntttttttttttt

SEQ ID NO: 828 - DNA, 398 bp, Lilium asiatic
tccggaagcccgcggcggagttaagccggccgtttggaggagaagaaggcggttccggcggggaagaagcctgctgagaagaagccgagggccgggaagaaggtcccggcctccaaggagggggcctctgacaagaagaagaagaggtcgaagaagtcggtggagacctacaagatctacatcttcaaggtgttgaagcaggtccaccctgacatcgggatctccagcaaggcaatggggatcatgaacagcttcatcaatgatctctttgagaagatggctcaggagtccgcccgccttgctcgctacaacaagaagaacaccatcacctcttgggagattcagacttccgtccgtctcgtcctccccggcgagctcgccaagcacgccgtttcttg

SEQ ID NO: 829 - DNA, 125 bp, Lilium asiatic
cgccgaatgatggcaaattgattgaatacttcaataattcaaatcgcgttgtgactgatcgatctgttgcgactattaggcattaattcacatccaaagttaaaattgtgtctttactcaactat

SEQ ID NO: 830 - DNA, 381 bp, Lilium asiatic
gatgattctgctgagattatacaggggattgctattgcggctaaagccggcttaacaaaggcgggctgtgattccacggtcggcatacaccctactgctgccgacgaatttgtgacgatgaggactcctacacgggaactgcgtaaggatcctgccccaagcgaggaaaagacagattggtcagtcaagtcaacattcgacgcctaggatctctctattaaagtgaatttcgctctggttgtatttgctgacagtcgattgtcacagtttgatgctcgtgaataccgaaatgatttaggaagagtgctagcaacaaatctattaggttcgtgttctgtattaattatacgaatatgtggcgttatctctacatctattaca

SEQ ID NO: 831 - DNA, 402 bp, Lilium asiatic
cggacgcgtgggtaccagatttcatgttcactaatctacggctctggaacaaccttagtccacaaggagatcttctatctagtgggatctatgatggcaacgcaagtgaggataccctagacgcaagtgaacttacatttaaccgactcttatggcaaaagcttggagtaaccaactccaccatgctgtgaccaacagttgatgctgcgagcagatgacacatatattatgagtagaagacaacgaagcgacatgcataaatcagtagaaggagaagagaggtaagttcgtacacctggtcaccaagtgcaggttctattttaaacgatgtagaaattctaatgtacaatgaccttaaccttgggaatggaaaccttggtaaggtataaggatattaacctt

SEQ ID NO: 832 - DNA, 293 bp, Lilium asiatic
gggcttcaccaaatataaccgcagtgactataatatgtggaaaggtatgaaccgcatagtgccagatggagtacatgctaagctgcttgaatgccatggcctttttgctaatcgccagcctggaagagcgttcatagatgctgtagccaaataggaatgtcctacccgtgaatgaaacattctcaactctttcagcatgtgttggtctgactgttaattcggtcttcagaactacacagtgactagaatgtctgtatgatgctgatatatcgccgatttagtatccttcatat

SEQ ID NO: 833 - DNA, 328 bp, Lilium asiatic
gatgatactgctgagattatacattggattgctatttcagctaaagcctgattaacaaaggggggctttgattccacggccggcatacaacctactgctgcctaggaatttctgactatgatgactgctacacgcgaactatccaaggatcctgcaacaggcgaggaacatacagatggatcattcaagtcagcctccgacgcctagaatctatctatataagcatatatctctctagttgtatttgctgacagttcatagtcaccagttgatgcttatgaataccgaattgatttacgaacagtgctatcaacatatctattatgtt

SEQ ID NO: 834 - DNA, 398 bp, Lilium asiatic
  modified_base (327)..(327): a, c, g, t, unknown, or other
  modified_base (361)..(361): a, c, g, t, unknown, or other
gccctttttcgtgggcacggtcgccagaaaagttgcttcaggaagacacgtatcttgccctagctagctcctttgtgctaataaggctcctctatatcttctttccaaagcttaatgcatgtcttaagcgagcttggaggagacacatgcggttcacaagcttaatgagcttttgggatcactcccaagcatatcttcagcaagccaggcagggtttctgcaggcttaatcggtgcaaaagaagaaacttacaggaaggagcaatgaatgcgactgcatgggcttcgacttcactggcttcagtatcgattgccgagactagttcangaaggtcacactcagctgctggaaaggagatgangaaggtagggttgaataatctaaaccggaggtaaaat

SEQ ID NO: 835 - DNA, 248 bp, Lilium asiatic
gagggcttccctgtatttgagaaaatacactgctctcataaggaaacacatcgttgatcagcctgattattggatcattagatgtgctgaccctctgagaaaattatacataatcatgctgacctgctgacgatgtaacaccgtgatgaatccaaaacatgccaagggaatgcggatttttcaagcatatctgaaggctactgggactacatatcattattggccagtcttgaaatggtagtgtttga

SEQ ID NO: 836 - DNA, 447 bp, Lilium asiatic
  modified_base (353)..(353): a, c, g, t, unknown, or other
  modified_base (399)..(400): a, c, g, t, unknown, or other
  modified_base (403)..(403): a, c, g, t, unknown, or other
attggaggcaccgaaggcgtgatagaatcgttggttgagttgcttcatgaggggagcccgagggggaagaaggatgctgcaacggctctcttcaacttgtgcatttatcaaggtaacaagattcgtgctgtgagagctgggatactgacacctttactcgaaatgctcaaagatccatccagcaatggcatggtcgatgaagctctgaccattttatcggttcttgtgagccagcaagagggtaaggtggctatagcgaaggctaacacaatcccgcttcttattgatcttttaaggaccgcacagccccgcaccaaggagaatgcaatagcgatattattggcactatgcanaaagaatgatgccaatctctcttgcattgggaggctttggccgggnnccnccccctttttttttaaaaaatttttttccccccccccccccttt

SEQ ID NO: 837 - DNA, 348 bp, Lilium asiatic
tcttctacatgtatatcatcatataacacccaatgtataatcttcaccgtgtgtttccctcaactgcaactgctattctttcatatccacattataatctaattttcctgatttctactcctttcactgtcccttctatatatttaggcagaattttttactatttaatctattactttactcatttctacctgcatcacttacaaccatctaaagatccttctttgaaatcttaaacattttcatttcaatcatcacttcatatatcacactaaaataatttcttattactttatttacatttattacaatacaatttttgacttttccaccatcaccaaaataatc

SEQ ID NO: 838 - DNA, 309 bp, Lilium asiatic
tatttattcctcctccacctcctcggatcctgactacctaccccttccttaccttatcggggaggcctcctgatccggaagatctatgctcgggtgaagattcatagtgtggagatggatgtgactgcgtctactccgtgtctggatgggatgaatcatgtgaagtcagatctctatgagatgtgctcacaagccgatttttgatgtttgcaagcttattttaccggatttagataattttggatctgttatgacactattatagtcttacatctatgtgatatataacatggctgtaatctaaatata

SEQ ID NO: 839 - DNA, 382 bp, Lilium asiatic
  modified_base (264)..(264): a, c, g, t, unknown, or other
  modified_base (341)..(341): a, c, g, t, unknown, or other
gcaaaaattgtaaggctgttgaaaaggaattgcttctattggaagatgacatgaaagctctggaggagatgtatcctcaaggagaacaggcagaggctacttgggctttcacggtacttggttacatggcaaaacttgtcttgggggttatagggttgattgtttcagtggcttgggtcgtgcacatcatcatatatttattgatcgacccgcctctttcccctttcctcaacgaagtcttcattaaattggataatgtatggngtttgctgggcactgcggcgtttgcaattttctgcttttatctccttcttgcagtaattgcaggggcaatgatgctngccctgaatctagttgtcataaccattcacccattgaagtg

SEQ ID NO: 840 - DNA, 377 bp, Lilium asiatic
cagacgcgtgggtgtcaccccatttatggaggaccatcctggaggtgatgaggtcttgcgggcggcaacaggtaaggatgctacagacgatttccaagacgtggggcatagcacatctgctagggagatgatggacaagtactacattggcgaggttcatgtgtcgagtgttcctacaaagcgtgcttacgatccaccccagcacgcaccgtacaatcctgataaaacttccgacttcgtgatcaagatactgcaatttgcagagccattgctgattctaggttcagccttcggagcccgacagttcaccaaaccggagtaggcactatctgtggcattctcaaaggctattatgttatcgaatctatttggaactt

SEQ ID NO: 841 - DNA, 323 bp, Lilium asiatic
gttttctcctcctctaaagatgagctccaccgcaacaacgaccaccaagaagggcggccgtggcaaggggaagggcaccaaatccgtgtcccgttcagtgaaagctggtctccagttccccgtgggccgcatcggccgctacctcaggaagggccgctacgcgcagcgtgttggctctggtgcccctgtttaccttgcctctgttctggagtatcttgctgctgagctgctggagcttgctggaaatgcggccaaggataacaagaagaacaggatcatacctcggcatattcagttggcggtgaggaatgatgaggagcttg

SEQ ID NO: 842 - DNA, 241 bp, Lilium asiatic
cggacgcgtgggtaccagatttcatgttcactaatctacggctcttgaacaaccttaggccagaatgaaatcttttatctagtgggatctatgatagcaaccccagttaagataccctttacccaagttaaccttcatttaaccgacttttattgcaaaaactttgatttaacaaattcaccattctttgacccacacattatactttgagcacattacacatatattatgagtttaaaac

SEQ ID NO: 843 - DNA, 269 bp, Lilium asiatic
gaaattggatgaggttgataaggaattattgagtttgaactctggtgaccaggctgcaataagagatctaattgaaaagttctctttggatgttcaacctgacgaagaaagtatcttaaacaagttatcaacaattaacaagtgcttcggcaaagaaaccatggaagaaatcattaaatcacttgaagatgaagccaaatccgagggaaaccaatggataggtgctgtccttaaaaggttaaagcgagcatctcctactggggtgacga

SEQ ID NO: 844 - DNA, 171 bp, Lilium asiatic
ggcggtgcacgacgagtgcaagctcaagttccttgagctgaaggcaaagcggacctaccgcttgagcgtgttcaagatcgacgagaagctgaagcaagtcaccgtcgagaagtgcggcgagcccggcgagagctacgaagacttcaccggcaggcttcctgtcaacgagtg

SEQ ID NO: 845 - DNA, 320 bp, Lilium asiatic
gtcactcctaagtagaccctccaataggtaagatcttccaggaactactcatcgcttgtggacggtactccagcgataacttatacaccagttgactgtccagcaccattgccaatgccttcgacggatgctggacaaacatatacactgcatagagcatgcataagcaatggttcagcgccttgcgcaaccaccactaccgccgtgacgctgtggaacagatgaaccctgtgcttcacaggatcggctgccgatagctctgcatgagatcatgcatcctagatccacaagatgttcaatacagctcaccagacacaact

SEQ ID NO: 846 - DNA, 364 bp, Lilium asiatic
gaaattggatgatgttgataaggaattattgagtttgaactctgctgacaaggctgcatgataaaatctaatggaagggttctctttgattgttcaccctaccaagaaaatctttttaaccagttattaaccatttaccaactctttagcaaataaacccttgaagaaattatttaattacttgaagattaatcccaattccaaggaaaccaattgattagttccttcccttaaagttttaaaccaaccttttctaattggtttaccatatcctttaaatctctcccttaaagccttaaacacaatctttccccaaatccctaaaaagagatttcacttttacaataaatcttctgatatcatt

SEQ ID NO: 847 - DNA, 295 bp, Lilium asiatic
gacgaacgtatgcgtgacatacctgatctaaggctttcagagtgctgctgatagcttgcgggcggtcatatggaaagatccgatatactagatgcctgtcctgtagcattactcatgaatgtcgactgatcctggagaactacctctttctcatggatcaggtgattatatattcttactagtcgtgcgagacaggcactatggccttgaccactcataacacagtaaacctatggcttcctgcactcgatgacggtttgtaggaactcgatgatgcatctaaggatctgatgga

SEQ ID NO: 848 - DNA, 385 bp, Lilium asiatic
  modified_base (342)..(342): a, c, g, t, unknown, or other
ttctgttacccgtggttgtcttcatttgatagatctcgctggcagtgagagggttgaccgttcggaagtaactggagataggctgaaagaagcacaatatattaacaaatccttgtctgccttaggagatgtcatttttgctctagcacaaagaagtaatcatgtaccatatagaaatagcaaacttactcaagtccttcagagttccttaggtgggcaggccaagactctcatgtttgtgcagattaatcccaatgctgagtcatattcagagactcttagcaccttaaagtttgctgaaagagtttctggagtcgagttacgtgctgcacggagcaacanagagggcaaggatgttcgagatttgatggtacaggtgtcatct

SEQ ID NO: 849 - DNA, 394 bp, Lilium asiatic
atgaggttgtttgatccatggcccgtgttcttcaagagggagtggaaccgcaactggccgttcctcaccggcttcgccatcaccggcgccctcatcaccaagttcaccgccggcctcaccgaggaagacgttaagaactcgcgtttcgtgcaggagcacaagaggtaaattcccatgcattattctgacacctgagctgctctacgtcattgatgagttggctggctggtttcctcgtgtgttgaaattagacatggcttggtaattacagtttcttcccatgtttttgtgtaataataatcaaccaattgatgggttccaaacttctcccagctgctcaaatatgatgctcttgttctttgccgaattattggtaatattcggcttttagttg

SEQ ID NO: 850 - DNA, 209 bp, Lilium asiatic
gacaatcctaagtagcacctccgttagctaagattttagcagaactactcattgcttttgggcggtcatccggagagaacttatacaccagttgactgtccttcaccattgacaatgccttcgacggatacttgacaaatatatacactgcatagagcatgtcatagcaatggttcagcgtcttgcgaaaccaccactaccgccgtgac

SEQ ID NO: 851 - DNA, 453 bp, Lilium asiatic
atctggtacccgtggctgtcttcatttgatagatctcgctggcagtgacagggttggccggtcctaagtaactggagattggctgaaagaagcacaatatattaacaaatccttgtctgccttaggagatgtcatttctgctctagcacaaagaagtaatcatgtaccatatagaaatatcaaacttactcaagtccttcagagttccttaggtgggcaggccaagactctcatgtttgtgcagattaatcccaatgctgagtcatatccagagactcttatcaccttaaagtctgctgaaagagctactggagttgagttaagtgctgcacggtgcaacaaaaacggccaggatgtttgagatttgatgtaacaagtgtcatcttttaaagacacaatcgcacaaaaagatgaggaaattgaacatctgccacaaaatcaagatcttggaat

SEQ ID NO: 852 - DNA, 309 bp, Lilium asiatic
gagatgaccagcctcaaggactatgttacaaggatgaaggaggggcagaacgagatattctacatcactggtgagagcaagaaggctgttgagaactctcctttcctcgagaggctgaagaagaagggctatgaggtgctctacatggttgatgctattgatgagtattctgttggtcagttgaaggagtttgaggggaagaagttagtctctgcaacgaaggagggacttaagcttgatgagagcgaggatgagaagaagaagaaggaagccctgaaagagaagtttgagggtctgtgcaaggtcatc

SEQ ID NO: 853 - DNA, 313 bp, Lilium asiatic
ggagaatcaaatgaaacagtacaagtgggaacaggagcagatatctaacatgaaggagtacattgctcggtttggacacggttctgccaagctggcccgtcaagctcagagcaaagagaagacccttgccaagatggagcgtggcgggctcacagagaaggtggctagggacaaggtcttagtcttccgcttcaccgatgttggtaaactcccccctccggtactgcaatttgttgaagtctccttcgggtacactcccgacagcctcatctacaagaacatcgatttcgggggtggatcttgattctaggat

SEQ ID NO: 854 - DNA, 300 bp, Lilium asiatic
ggaattgaattcccgacccgagcgacccctgacgtgcaacctgcaattatctgcattgatgaagatgatagttacttgggacaacgtggggcgacagatcatgaagcaaggactaacatcaaaaccgaggttatgtcattatgggatcgtttcaccacataccataacacacgggtgatggatctggctgctacaaaccgtccatacgagctacacgaggcaatccttcgacgctttacccagtcctttgagattgggataccagatcggatggagagagctaatatattgcaagtggat

SEQ ID NO: 855 - DNA, 404 bp, Lilium asiatic
gtcgatgcagagagtttcaaccccgagagatggcctctagatggaccaactccaaacgagatcgatcagaacttcaggtctccctgtaatctttactttcttattttcatcccttattttttattgtcatatgctcatcttttataagtcataggaaaaaatgattggtcctacttgatatagtgcttatcgattcttccagttatttaccatttggtggcggacctcgcaaatgcgtgggagacatgtttgctacatttgagaacatagtagctacagcaatgctagtgaggcgattcaacttccaaatggccattaccgcaccacctgtggagatgacgacaggagcgaccatccacacaaccgaagggctggtgatgacagtcacgccgcagggtttttcc

SEQ ID NO: 856 - DNA, 309 bp, Lilium asiatic
gaggactcgtttcaggatggaaaggaggcagtcattcaagcgtggtacatggacgatagtgaagaagaccagagacttcctcatcaccgtgaacccaaggaatatctttctttggagcaacttaaagatctaggagtcgtcagctggcgcctgcaaaatgtctatgattatgacaatgatgaagatatgaagaagatacgtgaagccaggggctattcttacgtggacataattgaagtgtgcccagagaagctgccaaactatgaggccaagatcaagagtttctttgaggagcatctgcacactgat

SEQ ID NO: 857 - DNA, 371 bp, Lilium asiatic
gaaagatctatatgataatgtcacaacaagtgttatatgtcacggagagaagagtgtcatcaaggaagggcataagagcttcccaagtggacattcatcatggtcctttgctggtctaggttttcttgcttggtatctttcagggaagcttcaaacttttgatcacaagggccacattgcaaaactctgcattgtcattcttcctctgcttgttgcagcccttgttgcagtttctagtgtggatgactattggcatcattggcaagatgtgtttgttggtggctttataggattggcagttgcttcaatttgttatctgcaattctttccaccaccttatgaaggtgatgggtggggaccttatgcctact

SEQ ID NO: 858 - DNA, 351 bp, Lilium asiatic
cggacgcgtgggggttcttggagacctggcagataccttaggtagtaatgctgccctgttgatcaagcagtctgtagcatgcaggcaatttttagatgaatgcttatcgtctgatgatgatatgatcaaggaatctgctgagtgggctaagttagcgatgaaccgtgctgtctctggttgatgttgctgtctctggttgatgttgctgtctctggtgttctaaaagagtccttgcatatgcattcgggttgtgtcgagtcggagtctagtctggtccaggattgcattcatgcattggtcggcaccatgttcgcacagaagtttcttttgggtggaagtcttcgggtcgtc

SEQ ID NO: 859 - DNA, 410 bp, Lilium asiatic
cgtcccgtagaatcaaatgaaacagtacaagtgggaacaggagcagatatctaacatgaaggagtacgttggtcggtttggacacggttctgccaagctggcccgtcaagctcagagcaaagagaagacccttgccaagatggagcgtggcgggctcacagagaaggtggctagggacaaggtcttagtcttccgcttcaccgatgttggtaaactcccccctccggtactgcaatttgttgaagtctccttcgggtacactcccgacagcctcatctacaagaacatcgatttctgggtggatcttgattctaggatagcgctggtgggtcctaacggggcatggaagagcacactcctgaaactgatgactggtgatcttgtttaactgatggtatggttcgtcgtca

SEQ ID NO: 860 - DNA, 453 bp, Lilium asiatic
atcaatcccaagtagccactcagatgggtaagattggagaggaactagacattgattttggtgtatcaaccggcgataacttctacgacagtggactgaccagcaccgatgacaaggccttcgaggcatccttcacaaacatatacactgcaaagagcttgcagaagcaatggtacagtgtcttggggaaccacgactaccgcggtgacgctgtggcacagctgagccccgtgctgcagaagatcgatagccgatggctctgcatgagatcattcatcctcgatgcagaaattgttcaattcttcttcgtagacacaactcctttcgtaatgaagtactgggacgacccagaagatcaacactatgactggagggacgtcgctccacgcgataactatatcaagaatctacggaaggatttggactccggactgaaggaatcaacaagcacct

SEQ ID NO: 861 - DNA, 363 bp, Lilium asiatic
tccgaaagatctatcttataatgtcacaacaagtgttatatgtcactaagagaaaattctcatcgagggatcacataatagctagccatgaggacattcataaatgaactctgatcgtctaagtattattgcatcaaatatttcaggtaagcttcaaacttttgatcacaacggccacattgcaaaactctgcattgtcatacttcctatgcttgttgcaatccttttttcaaatactactgtggatgactattggcatcattggcgacatatgttatgttggggctttataggattggcacattcttcaataatgatatctgcacatatcttcaccaccttatgatgtcgaagggttgggac

SEQ ID NO: 862 - DNA, 454 bp, Lilium asiatic
gatgaaggaatggttgagagagctgcacagttgggccaagaatttagggatcaactgaagaaaattcaaatggaatttccacatataattaaagaagttcggggaagaggattactgaatgcagtagacctgaatgatgagtctctttctcctgtctctgcttatgatatatgccttaagttgaaagagagaggaattctggccaagcccactcataacacaataattcgattggctcctccactctccataagtttggaggaactggaagaagcatcgaaggctctgagggatgtgttcgagattgatttgccaaacatgaaaaagcagatgcctaaaagagaagctcccacagatgacaagacatgtgatagatgtggtcgacatgtatacggctaatttgcacactgctttatctccttgtatgttttgcaatgccgaatctagaatcaat

SEQ ID NO: 863 - DNA, 221 bp, Lilium asiatic
aagatctatattataatatcacaacatttattatatatcactcatagaacaatctcagcaaggaatttcataaaaacttcccaattcaacatttatcatattcctttttctaactacattatcttactatttatcttttattcaatacttcaaactttttatcacatcctccacattttttaactttccattttcattttatctcttcttatttcaaccct

SEQ ID NO: 864 - DNA, 393 bp, Lilium asiatic
gccttattctttgacattgatggaatatcagaccgagaatctaatttgcctcacatgttgccttcagaagaagcttttgctgctgctgtttctgcttttggtattgacaacaacgacagagtgattgtttatgatggaaaaggcctattcagtgctgcacgtgtttggtggatgttcctagtctttggacacgacaaagtttgggttctagatggaggactgccacagtggcgtacttccggatatgaagttgaatcgagtgcctcgggagatgcaattttgaaggctagtgtagctagtgaagttgttgaaaagatttatcatggacagttggtaagcacaaccacatttaaaccggtgtttcaggcccatctagtttggactattgaagca

SEQ ID NO: 865 - DNA, 391 bp, Lilium asiatic
gccttattctttgacattgatggaatatcataccgagaatctaatttgcctcacatgttggctggagaagaagcttttgctgctgctgtttctgcttttggtattgacaacaacgacagagtgattgtttatgatggaaaaggcctattcagtgctgcacgtgtttggtggatgttcctagtctttggacacgacaaagttcgggttctagatggaggactgacacagtggcgtacttcctgatatgaagttgaatctagtgcctcatgagatgcaattttgaaggctagtgtaactagtgaaattgttgaaaagactcattatggacagatgttaagcacaaccacatttaaaccgttgtttcaagtccatctatgtttggactatttga

SEQ ID NO: 866 - DNA, 394 bp, Lilium asiatic
ctttggacgaggttgccatccaaaatctgaagtcgtacatggaaaagaacttagatgatgtcaggaaggaagacctcgattgatgtgataggaatgaggagaagcagaaggaaatcaaacaggagttcggccaaacctgcgattggatcaagaagaggctgggaaacaaagtggccagcgttcagatttcaacccgtcttagcacatcaccgtgtgtccttgtatctgggaaattcggctggtcggccaacatggagaggttaatgaaggcgcaaacaattggagacacacagcagttggatttcatgcgcggaaagagagtcttcgaaattaatcctgaacatccaattatcaaagacttgaacgaagcatgcatgacattcccttgagatgc

SEQ ID NO: 867 - DNA, 437 bp, Lilium asiatic
tcaggatctgatgaagaggctcttctcaaacagcttcctttgtcttttgaagaagagcctgttcatcaaaagacaaaggaagctgtttgagaagcagaattttaacatggaaaggttcaaggaacttcagaatcgctgcaaatgtcctctagaccatgtagaaggcacaggacttggagagtttcaccaggattgaaacaaaaggtagctttgtattttcttgacatacaggtgattgtctttcaatgtaatcacccaggtcttttacctttcttatataatgaggattgagaaagttggctcttgatgtagagaagctaacaggagatgttgttctctttatgagatttgatatcattgacaaactctgacccgaatgtgggagaatatttcagttttgtagtaaatattaagaattcaatacagttgatcaaggc

SEQ ID NO: 868 - DNA, 394 bp, Lilium asiatic
ccacgattcctcattcccgtgttgtgggtcaatactccagtgcagaatcgagaaaggtacatcaggttgctgatcccagaagccatggttagatgtgttcgctgctgctcaggaccaactgaattcaaagttgaatcttacatacaggcttcatttctggatttttcttttcacgaaaaagcatcccacaatggcaagggatattctctcattaggtataaccaaatgtttacagagatatttgttgtatgataactctaaatgttattatagttaagttctcacctgacggaatttgggctttaatttgtaaatgttttggatgtgcagcttaatatggtttggatgtgtagcttaatattggataattggaaaatgtttggatgtgcagctt

SEQ ID NO: 869 - DNA, 432 bp, Lilium asiatic
  modified_base (358)..(358): a, c, g, t, unknown, or other
cggacgcgtgggcggacgcgtggggcaaggcccctgctccatgaagttgattctgagggtggccaagttttaccagttaagatggagactgaagtgtggcaaaatttggagggatcgtttgtttcattattgcttactttgccagctggtgagcaggcggagatcttggcggaatggttgaggtctgagcatgtgaggtatccagacctaaccgaggcttttgaagtttggtgttacagatctaagattgccaggaggaggcttgcattatcagacgacatcaacagcatgagtggcgcagaacttcatgatccatcagttttatatccctctccttcttggagggaggacgaacggngactagaacacagtttttgaatgtggggttcacctgtacaacaaaaataagattgtgtttcaaagataagtatt

SEQ ID NO: 870 - DNA, 377 bp, Lilium asiatic
ttatgaagtaaaattatgaaattgttcatagttaatgtgaatttgatcttctatgagtgggatgtggactatgatttatgtttgagccccctctatattgtgatcttatgactcgataaacctagaattcatggctgagttggaattgagggtattattttatgccggtatcaatttgcacttgtgtgctatctttagcctcctcgggttgcgactactatgaattactatttctgaaattttgaaatttaaaggggaaaggttttcttttcaaatttgatttacaactatgggtgcatttttagctcaagtgtaaaatttggctttagtggcatttgcattcttaatatggattaatagctttcttggggtcacta

SEQ ID NO: 871 - DNA, 387 bp, Lilium asiatic
  modified_base (332)..(332): a, c, g, t, unknown, or other
  modified_base (338)..(338): a, c, g, t, unknown, or other
  modified_base (356)..(356): a, c, g, t, unknown, or other
gagatccgtaagtaccagaagagtactgagcttctcatccgcaagctccccttccagcgtgtggtccgggagatcgctcaggatttcaaggccgacctccgctttcagagctcggctgtggcggcgctgcaggaggcgtcggagtcgtacctggtggggctgtttgaggacacaaacctgtgcgccattcacgcgaagagggtgactatcatgccgaaggacatccagctggcgaggaggatccgtggggagagggcctgatcatgttagggtgtctgattcgtatcttgcgaatatgttggttgggctgtgtgcttttagatgtgaagttngttgtnttgtgtaatggatgctgntgttaattttgtgggatatcctttgagttcc

SEQ ID NO: 872 - DNA, 379 bp, Lilium asiatic
ctgactcgttggcgtactcatggggcatggtccctgctccatgaagtttattctgatggtgaccaatttttaccagttaagatggatactgaagtgtgtcataatttgtaggtatcgtttgtttcattattgcttactttgccatctggtgagcagactgagatcttgacagaatgcttgatgtcttagcatgtgatgtattcattacctaacctaagcttatgaatttttgtgtttcagatctataattgctattatgatgcttgcattatcatacttacatttacagcattaagtgcccatatcttcattatccatcatttttatattccttttcttcttatatgtaggactaaatgggtactttaacacaattttt

SEQ ID NO: 873 - DNA, 405 bp, Lilium asiatic
acggcctgcttcaaaaacccgagagcactaaaataagggtcttcataatgcgcacgcatgaacgagtgatatgcacgcatggttgaataatacgcacacattataaacccgaaagcaattatataaatacctttatcatgcgcgcgcattgaaacaaaatacgcacgcattatataattaatgcgcacgcatcatataataatgctcacacattcctttataatgcgtacacaattttaatttaaataaatatataaagtatgggaagaatatttagtgccaatgtcttatcgagatgctgtcgagcttgaaataaaatctgatgaataagaaggaagatgtattgagtaaattattggaacatattaaataaaatgtgttaaatgcccatatcttcacttattt

SEQ ID NO: 874 - DNA, 367 bp, Lilium asiatic
  modified_base (185)..(185): a, c, g, t, unknown, or other
ctctccttcttgacatcccaagcatatgatcccaatgcgccacctacttctagcgggcgagcaggtggtggacgagatgaaaaagctggaaggatgttggcgaaagctggtgatggggaaggatctgggggtaaatgggatgttaatgggttggaaaaggaggaatccccaaaggagatgatggngatcttgaagaagaatattgatagggagcaagcagtcgctgaagccaaactttggggagaaaactggagggaaaagatacgagctagccagcagaaatcaaattccaatgagtaaagatcttccacatgtggcaaaatgtttatatgcaaggccgcaatcccataatcatggtaacgttttt

SEQ ID NO: 875 - DNA, 443 bp, Lilium asiatic
gaccctttctgatgcaggtaaacaagcatacatgaaagggaagagagtccttgagattagcccggggcaccccatcggcaaggaacttcgcgagagagttgctcttgatccccaggatgcaagtgtgaagcagatggcaagactggtgtacaagacagctcttttggagagtggcttcattctcaatgaccccaaagatttcgctaatagtatatatgattctattaagtcaagcctgaagattagccctgatgtagcagtagaagaggaagatgacctcgaagaaccagaggttgaagagaaggaatcaactcctgatggagagaatacagaagctttcgaagaggaggaagtcggacacgacgagctatagactaaggaagggtgtatacttttttttttccctttttttttttccccattttggggttttaggttttttg

SEQ ID NO: 876 - DNA, 449 bp, Lilium asiatic
cggacgcgtgggcggacgcgtgggtggtgggaccgggtatcaaggtggagctcaacctggtcctagctcgcaaggggactaccaggtgcctcatcaggggcatttttcgcaaggcatgagttacatgcattctcagttgcataatggggacctccaaaattaaacatctctgcctgctacttagatgcttatttgatcaggagtctctaggtattgaaggtttgtaagggaggacatagatatccgggtgctgacctggataggatttatgttgggttagttcaattaaccgaactagttgaaacaaggcacttcgactactttgctgtgttcagaatatcaaatttagtgaactgtgttaatataatgaacatctgtactctaattcttcagaatatttaaaggggggttttccccgggggggggaaaattttcccaaattttttttt

SEQ ID NO: 877 - DNA, 350 bp, Lilium asiatic
gagcaagtttggggatcttgcagattgcatcgtgatgaatgaacgatctagtggtcgaggccgtggatttggttatgtgaccttctcgtcagcagatgatgcaaagaaagccctcgaaagtgagcattctcttggaggtagaaaccttgaagtgaaggtggcaacgcctaaggaagaaatgaaaggaacttctaagaaagtcacccgaatttttgtagcaagaatcccaccgtctgtcacagaaacaatgtttcggagtcattttgaggactatggagagataacagatctgtacatgccaaaagaaaaaggttctgaatggcatcgtggtattggatttatcacttttg

SEQ ID NO: 878 - DNA, 249 bp, Lilium asiatic
acatgaatgggatactaagcaagctgaggaggctgaaaagctccgaaagattaatgaatctgatgggaactcaggagctcaaaccgaaatcgagaaggatgaaaatcgctcaaagactgtcaaggtttatagagatgacgatgacttaatgcgaacaacatcaccgatcgtcgcatcccatgctgctgtctgcggagatgacatgctctcaaagtggcaacttatggcggaacaagctatacataagcg

SEQ ID NO: 879 - DNA, 381 bp, Lilium asiatic
ctctgcttcttgacatcctcaagcatatgatcccaatgcgccacctacttctatcagtccggcacgtgttggacgagatgaaaaagctggaatgatgttggcgaaagctggtgatggggaaggatctggcggtaaatggcatgttaatggattggaaacggaggaatccccaaatgacatgatggggatcttgaagaataatattgatagggagcaagcattctctgaagccaaactttggggagaaaactggatggaaaagatactagctagccagttcaaatcaaattccaatgagttaagatcttgcacatttggcaaaatgtatatatgcgatgccacaattccataatcatggcttcgtttttcaacatatcgatg

SEQ ID NO: 880 - DNA, 398 bp, Lilium asiatic
tcgttaaacttgagaagactgccgcggatgcaagaacttaacaacagagtgaactgtggcgcggtgcattgcatagacttgctgggactgcttaccagaaatacatggattgctcggtgcctaacacatacaaaaacgccaaacttgttgccctggctcttgtcagacggtgattggcacaatatcacaaatttctggagacacagagtagatgctttaatgagcctgttttccgggacatgttcctctctgtgtcttgcagcaaccattgtgtggacattgtctcaacacgagaatgtgctaatcgattggtttccactctgcatccaaaagttacttcatattacaattccaatatgtccccacaatctgtactgaaagtctaatgttcatgaatt

SEQ ID NO: 881 - DNA, 386 bp, Lilium asiatic
cggacgcgtgggcggacgcgtgggcggacgcgtgggcggacgcgtgggcgcggaagaagagcaagggggcagggaatcctgtgattacgtgggggacatcggtagtggcagcggctgtggcggaggaggaggcgtcgccgtgaggatagaactcgacgttcttgattgcggggtctgctacgagcccttgagcccgccggtgttccagtgtcgcaatgggcatgttgcatgctctacctgctgctccaaacttggaaacaaatgccccagttgctccgaaacaatcggctatagccgctgtctggcgctcgagaaagtcatcgagtcgatcaaaattccatgctctaatgcaaattacgggtgcaaacaaacctttgtctaccctc

SEQ ID NO: 882 - DNA, 434 bp, Lilium asiatic
gcgatcagtttctcatatttgcatctgatggtctttgggaacaccttagcaaccaagaagcaggtgatagggttcgaaatcatgctcatagtggaagcggacgtcgacttgtcaaagctgcactgcaggcggcagccaaaaaaagggagatgcgctacaccgatctcaagaagattgaccgtggcgtgcgtcgccatttccatgatgacattactgtcgtcgtcctgttcctcgattccagtctcacgagcaagcccagcacaagcaaaggacccgtgctgtccctaagagggggcgggatcagtctgccctcgaattctcttgcgccatgcacgacaactgtggaactcggtactgcctgacaaagagctaagaaatactttgtcattatactcaggttcacgaccaccatggatgcgaggaagaagtgatcg

SEQ ID NO: 883 - DNA, 291 bp, Lilium asiatic
aacaaatattcaaaaatttattaactgcttatacaatttgcgtctagcattataaacctgaaaaagggggaaaaactctgggcgcaagggcaaacaatcaccatactgacttaacttatatccaggaggttcattataaactattcaaaaaatatattgtaataaggatcaatttctctacagaactatttgatatccctaatgaccatgccctctcaattatgttcatagatgaaattcattacctccaatctaacataatatagtgactcactttcaaaataacacagt

SEQ ID NO: 884 - DNA, 375 bp, Lilium asiatic
gcgtgcgaaaaatacccaagcctttacttccaatactgttactctgctaccgggattataatattaaaatttcgggattatggtctgcggcaagcgcaaacgattacgtttatcaaatatgtcagatcgatcagctccattacagcctattcaatcaagcaaagattttctgcatggattgttcttcatttcgattggatttgtctccttcatgggatttctctttgttgctatcatatccaagtttctcccgccatctcaaaatcatatattgtctgccattcaaaatgacaggtactactgtctgctggtgcccttaacactacctctacttggtgttgctggatatttccactggctcagcatgaaactttt

SEQ ID NO: 885 - DNA, 216 bp, Lilium asiatic
acaatatattgctcacttggattaatcacttaagactatagtatccaaactagagcttggggaatcctacatgtctgtcgcggctctcatggaaagtgtaaatgtcattcatgcttcaattgtagtgattaaccatctgaatgatctggctttacttgatcgagttcacgacttgatataaattctatttgtacaaggcatattacttcaaaatta

SEQ ID NO: 886 - DNA, 464 bp, Lilium asiatic
cccatttccaccgtcacaagtccaatctcaatcgccgatcccgatggcgccgaaggccgggaagaagcccgccggcaagaagccagcggcaacgccgcccccggaggaggagaagccggcggttccaccgccatctgagaagaagccggcggagaagaagccgaaggccggcaagaagctgccggtctccaaggagggggacgcgaagaagaagaagaaggcgaagaagtcgatcgagacctataagatctacatcttcaaggttctcaagcaggtccaccctgacataggcatctccagcaaggcgatggggataatgaacagcttcatcaacgacatctttgagaagctcgcccaggagtccgcccgcctcgcccgctacaacaagaagccgactatcacctcccgtgagatccagacctccgtccgccttgtcctccccggcgagcttgccaagcacgctg

SEQ ID NO: 887 - DNA, 440 bp, Lilium asiatic
gacgatcaagaagccgtagccctaggccaaggtaccgcgaggattaccgggatagggatgataggaggcggagccctagtccaatccgagataagtatcgtggaagagactaccgccgccgaagcagaagtgtcagtgcaagcccagatgattatggaggtcgtggaaggggcaaggccaggagcaggagccactcttatgacaggagctcgtctccccgacggacacctcctcgtggtggaagccctgccagacgcaccaatggcaaacggtcactttcccgaagtgtgtcaccccaaggccgtcgtgcacgttccatgagtgcatcgtcacacagctccggttaggatcacattaagaaagacatgtcactctgttcatgactgaggaagaactttcaaacaaatcgtgtgtgccattattctggtagatctggattc

SEQ ID NO: 888 - DNA, 433 bp, Lilium asiatic
  modified_base (28)..(29): a, c, g, t, unknown, or other
tgttaattcattacataccacatcacanncatcgtgaaaaatgggaaaaagtaagtggtgcgtgtatgagcgtaagctaggaatcaaataattaagtatttttcaattaacaataattatctgtgtaaacatggttttgacatctagataaacggttatcgacaaatagggataatctgctccctttatatcagatcggggtgccccaaaatccaaattggtacccatatccactttgatggataactgaaaatgctatccatatccatatcaatgaaacaatgaatattaatgatcgacgagcttatattatcgtcgtccaaatgggagtcccatggttcgaactttcttgctcacaagcttgtcgtgtctaaatttgtattgttgaaaacaattgaacttttgaataacgttgtctcattgaactttgttt

SEQ ID NO: 889 - DNA, 379 bp, Lilium asiatic
  modified_base (76)..(76): a, c, g, t, unknown, or other
  modified_base (113)..(113): a, c, g, t, unknown, or other
  modified_base (300)..(300): a, c, g, t, unknown, or other
  modified_base (305)..(305): a, c, g, t, unknown, or other
  modified_base (309)..(310): a, c, g, t, unknown, or other
  modified_base (312)..(312): a, c, g, t, unknown, or other
  modified_base (314)..(315): a, c, g, t, unknown, or other
  modified_base (340)..(340): a, c, g, t, unknown, or other
cgggcgaccgacgcgtgcggtgacggagtttcttccacgtgggagtttgtttcggttacttcagagaaacgcaacnaggcttgattgtagacgacgtgttcacatggctttanatattgcaagaggcatgaactatcttcatcattgcaatccacctattgttcatcgggatctgaagtcatctaatctgttagttgataagaattggactgtgaacgtaggggattttggcctttcgcgtttgaagcatgaaacttatttgacaacaaaaactgggaaaggaacaccacaatggatggncccanaaanncngnngaaagaaccctcaaaaaaaaaagcngatgtgtacagttatgggattatactatgggagcttggc

SEQ ID NO: 890 - DNA, 322 bp, Lilium asiatic
acattatatacaattttaaaattacattatatcccttcaaactcgcaaattacaattgtttctatcactcatactcaccaaacacactacaccattatacgattctttcaatcttatctttttcacaaacatattattcaattctccaccactctataaaaaaaacccaaacactcactaacctacataacacctctattactttcattcttcaacttcattttcatttatcttccaaaatgaactcttacactaattataactacatatacagtccaaccacacctcctctatcttcacataccataccattataaacttt

SEQ ID NO: 891 - DNA, 397 bp, Lilium asiatic
gcgcagaactatttgaaagtcttggaattgcacaaccaaagggagtattgctttatgggcctgcgggaacgtggaaaactctggtggcaagggcagttgctcaccatactgactgcacgtttatacgggtgtctggttctgagcttgttcagaaatatattggagaagggtccagaatggttagggaactttttgttatggctagggagcatgccccgtcaattattttcatggatgaaatcgatagtattggatctgccagaatggagtcaggcactggcaatggtgacagtgaggttcaaaggacaatgcttgagctcttgaaccagcttgatggatttgaagcctcaaacaagataaaagttctgatggctaccaataggattgacattttgga

SEQ ID NO: 892 - DNA, 432 bp, Lilium asiatic
ggccatggaggtcacacattatctaggaggagagaattttgttttctggggtgggcgagaagggtatcaatctcttttgaacactgatatggaaagagagctcaatcacatggcaagattctttcaagcagctgttgagtggaaacaaaagattgggttcaatgggactctattaatagaacccaaacctcaagagcctacaaaacaccagtatgactgggatgctgcaacttcgtttgcatttctgcagaagtatggtcttctaggggaatttaaactgaatatcgagtgcaaccatgctactctatctggacatagctgccatcatgaacttgaaactgcgagaataaatggaatacttgggaatatcgatgccaacactggtgatccccaagttggctgggacactgatcagtttctcacggatcttgg

SEQ ID NO: 893 - DNA, 113 bp, Lilium asiatic
  modified_base (106)..(106): a, c, g, t, unknown, or other
gataactgttgtccttccttatccagaagtaaaacttttgctaatatcaaatgcgaggcgggacataaatttgacctgtgcgatgttaccatctacagacctcttnctgcact

SEQ ID NO: 894 - DNA, 302 bp, Lilium asiatic
  modified_base (10)..(10): a, c, g, t, unknown, or other
ggccatcganctcacacattatctaaaattagagaattttgttttataacgtgggcaagagggatttaaaactattttgaacactgatatataaagacagctcaatcacatggcaagattctttcaagcacactgttgagtctaaacaaaacatggacttcaatgcaactctattaatagaacccaaacctcatgaacctacaaaacaccactatgactgggatgctgaaactgaatgtgcatatctgcagaattatggtctactacaagaattctaactgaatatcgaatgcaaacattct

SEQ ID NO: 895 - DNA, 168 bp, Lilium asiatic
  modified_base (67)..(67): a, c, g, t, unknown, or other
acattatctaaatttacaatttctaataaaaaataacaccgctaaattaaaactctctgtgccactnatccaaacaaacatctcaaacacatataacaattctttcttactcatctttaatctaaataaactattaatctcaactccactctctccatacaacccaaa

SEQ ID NO: 896 - DNA, 317 bp, Lilium asiatic
ttcacatgggctatatagtagccgccagggaatgggctatggtggaggttctgcaagtggtgcaagtggtggtgatactggtctttactcatcaagctttggcagtagttatctgtcacgtgggtctgatgttggtggtagctcttattcctccttgtattctggccgcaacttaagtggcaatgggtacatgggtggtagtgggtctggttcttactactgagagactgacatcacaagaagaagtccaatgtaggctgtggattatgaagcttctggatttgatgcctacacacttggaaagaaattgtagtgtg

SEQ ID NO: 897 - DNA, 300 bp, Lilium asiatic
tacacatggactatataatatacccgcagggaatgggctatggtggatgttctacaaatggggcaagtggaactgatactgggctttactcatcaaacttaggcacgagttatctatcacttggatctgatgttggtggtcgctcttattaattcttgtattattgccgctacttaagtggcaatgcgtacatgggtggtactgcgtctgactcttactactgagagacttacatcacatgaagaagttcaatggaagctgtggattatgaagcttatggatttgatgcctacacacttg

SEQ ID NO: 898 - DNA, 237 bp, Lilium asiatic
cggagggtgaaagcaagaagaagaaaactaaaactgagaaatactgcgactgggaattggcgaaatgaaacaaagccaatatggatgcgttctccaaaagaagtttcaaaagaagaatacaatgaattctacaaaaagacattcaatgagttcttggacccgattgggtacacccatttcaccactgagggtgaggtcgagtttagaagtgttctctacattcccggaatggcacct

SEQ ID NO: 899 - DNA, 299 bp, Lilium asiatic
caggaagctattgaatgcctagaatctttgaagctggatgctgatgaaatcggtctggagaaacggcgccgctccgtgctcgatttccttcacaaccagctcgcagaatcccagaaaccagtccctgtttcccctgcctgaatatgtgtcattattaatccctgttttccctgcatgaatatgtgctattatcggtactgtttgactagagatgtattagtctatcgtggtggctacatgtacagatggcttgacggataaacctaagattacatatgctcagatctgactctatacaa

SEQ ID NO: 900 - DNA, 326 bp, Lilium asiatic
gaaaacccggctcgacgcacgcgtacgcaggaagctattgaatgcctaaaatctttgaagctggatgctgatgaaatcggtctggtgaaacggcgccgctccgtgctcgatttcctttacaaccagcttgtaaaatcccagaaaccagtccctgtttcccctgcatgaatatgtgccattatcactccctgtttaccctgcatgaatatgtgctattatcggtactgtttgactagagatgtattagtctatcattgtggctacatataccgatggcttgacgggtcaccctacgatttcatatgctcagatcgtactctatacaa

SEQ ID NO: 901 - DNA, 299 bp, Lilium asiatic
acgcaggaagctattgaatgcctaaaatcttttaagctggatgctgatgaaatcggtcttgggaaactgcgccaatgcgtgctcgatttcctttacaaccagcttttataattccagaaaccaggccctgtttgccctgtcttaatatgtgccattataactccctgttttccctccatgaatatgtgctattatcggcactgttatgactagagatgtattaatctatcatggcacctacatatacagatggtttgacggataatcctacgatttcatacgttcatatcgacctctat

SEQ ID NO: 902 - DNA, 370 bp, Lilium asiatic
aggactcctgtgccgcctatggcttatcagatcgccgccgatcgccggcgcaacacaaacgcgatatgggcgcgacaatcagagcgccacctactacttgtatcactccgatgtcactactggctatggagaatgtgctttcctctatcttttagctagtgaatcactactcataggcataacaaagtgcatgtctttctgacttactttatcccctggcagcaaccgtgctatgaccatcatttattgcgctccttcatagctcaccttcttggatgctgatgcttatattgtcactggtgctacaaagaacacctaccgatactaaatacagacatgtgatctatgctcaaaggttgtcttgcgaaat

SEQ ID NO: 903 - DNA, 466 bp, Lilium asiatic
  modified_base (61)..(61): a, c, g, t, unknown, or other
gcgcaatccaacaacatggcagcagaagccgtctaccggaaggcgcagatgattgacccanacgccaacggagcctgcaatctggccctctgcctcatcaggcagtcccggttcgatgatgctcgccatgttctcgaagacgtcattggaggaagctatcctggatctgatgatagccgaacaatgatgcgggcggaggagctactgcaggagactctgggcctgttggaagctcaaaaaactccggatgctgaaatgaagagattggaagaggagatgatgaataggctagattttctgttgaatgaatgggagccattcagctcgaccaggctgccaatatttgaggagatagcttcgttcagagatgagatggctgcttgttaaatggcttggtgtagatgtttgtgaatattactttatatcacttctgagaagtggggtggggaatggattgtgatctgaa

SEQ ID NO: 904 - DNA, 482 bp, Lilium asiatic
  modified_base (116)..(116): a, c, g, t, unknown, or other
ggacgacggacgcgtgcgcaatccaacaacatggcagcagaagccgtttaccggatggcgcagatgattgacccaggggccaacggggcctgcaatctggccctctgcctcatcangcagtcccggttcgatgatgctcgccatgttctcgaagacgtcattggaggaagctatcctggatctgatgatagccgaacaatgatgcgggcggaggagctactgcacgagactctgggcctgttggaagctcaaaaaactccggatgctgaaatgaagagattggaagaggagatgatgaataggctagattttctgttgaatgaatgggagccattcagctcgaccaggctgccaatatttgaggagatagcttcgttcaaagatgagatggctgcttgttaaatggcttggtgtagatgtttgtgaatattactttatatcacttctgagagtggggtggggaatggattgtgatctgaaat

SEQ ID NO: 905 - DNA, 467 bp, Lilium asiatic
cggacgcgtgggtgccaatgcctccgcaatctcaagcaccgcctccacccccaccgcctggttcacaaggaggaccgccttctttcaatcctccaaggcccccaccaccagggtctgcaccacctatgggtaccatacagccccctcctcccccgcctatgacaaatggctacatgcggccagtttctacctccatgccacagccaatggggagcttcactcctggtgttgacatgggtcggccaccgatgcaaggttttcccggacagcagatgcaagcacaagggccgcccccaccgcaggcaaacatgggtcgctaacttgcaatgtcatcccgcatattttctgtctccaatcaaacctaagtttgttcttccgtaccgttaattaacggagatgggtgacatgctgttttgtatgttcggatagctatgaatatgcttttcggtgtttatgacggtatgcta

SEQ ID NO: 906 - DNA, 203 bp, Lilium asiatic
  modified_base (14)..(14): a, c, g, t, unknown, or other
caaacaccttactnccaatccgtacaactttttaaacgaaaactccaattctgaaccctgcttgaaaactagaaccgcgtcagttcaatcctctaacaatcactctactaaaaactaaatatcttatgacaataatatatcaacttgcttgttttcctaagagaaatcactacatgcaagtaaatctatacatccatgcctat

SEQ ID NO: 907 - DNA, 284 bp, Lilium asiatic
gcccctctggtcgaaacaggtagctcagctttccggctaaaccaaaacgagtggtgaagtgttgtattaataataactgaggaatttctttttctttattttcttttatatgtatatgtagtaactaagacagtgaggccagactaacccagacattcaaacgttaatcggttaaaaggatctagaacctctcatgcaccttttcacctaaaaaaaaaaaaaaaaaaaaaaaaacacaaaaacaataatacaaaaatttaaaaacacaggatttttatgcgcta

SEQ ID NO: 908 - DNA, 437 bp, Lilium asiatic
gcgataatcatgtttttgaacctctctaagtagtatcttctcccctaaggaagatttaaaatgggcagtggtatcaataatctgaacgataccgggacaagtatcaaatctaattgaggtcctgttatgtccgtgtaattaccattcacgctcgtccccggatcacgtcaatcaatcagtcagaaagaaagtcgacaaccacatgctttttatgaaacacatgttattttttacattctacccacaaaaacctatcggcaaaatttagatgccatggctatgactggtttacagtcactgttcactcacaccctcaaaattcgagttaacttgtacacctgagcacttctgcgaagcaaggtcaccttccaaggagcttcgacatccatcggcccttttgttgctggttctctggagatattgatcatctttgaact

SEQ ID NO: 909 - DNA, 452 bp, Lilium asiatic
gacatatcaaaatgttatttaccaaaataagtttctcttcaaggacaaggttgtcctaggtgtgggtgcacggactggaattttatctctgttctgtgccaaagctggagcaaaacatgtatacgcggtggagtgctctctcatggctgatatggcaaaagagattgttgaaaaaaatggtttctccaatgtcattacaattcttaagggaaaggttgaagagataactcttccagttgctcatgtagatgtcatcatttctgagtggatgggctattttcttctatttgaaaaatatgttaaacacagtcctgtatgcacgtgacaaatggctgatagatgacggacttgtgttgccagacaaagcgtctctttatttgacagccattgaggatgctgaatacaaagaagacaaaattgaattctggaataatgtttatgggtttgacatg

SEQ ID NO: 910 - DNA, 382 bp, Lilium asiatic
caaggacggagcagcgccaccgaagaactcgatgaatgaaaatgccaattctgaacctaggatgaagactagaaccccgacagtgcgtgccagtcgcaatcactctactcaaaacgaagtatctgttgacactagcctttcaacttggttggtttcgccagagaaatcacagctggaagtaaacgagggaagccagtctatccggtcagcttcatcactaagccgagaggagcaaccaattttaggcgccttgacagttgaagacatcaagcaatcttcggtgacttcatcgccacgaaggtctccaagcaagaaccccgacgatactcccatcgtgggtactggtgggagctattggaattctatcagtgtcgatgattct

SEQ ID NO: 911 - DNA, 249 bp, Lilium asiatic
  modified_base (48)..(48): a, c, g, t, unknown, or other
aaataccaaatctgaaccttcgctgaatactaaaaccccgccgccccntcccattctcaatcactctactcaaaacaaactatcttttgacactatcctttcaacttgtttggtttcgccatacaaattacatctgttattaaacaaaataacccattcctattctctcaactttatcactaatcccatacgatcaaccaattttatactcctctacacttcaatacatcaatcaatcttcttttactt

SEQ ID NO: 912 - DNA, 458 bp, Lilium asiatic
gagaaatatgatccgtctaaagaccctaacatatctggagatccatacaagacactgttgggtgcaagggttaattatgagacaactgagcaccgactcaaaagggagtttgaagcatatgggccaataaaacgggtaaggttgattactgataaggagacgaataaaccaagaggatatgccttcatagaatacgttcatacacgagacatgaaatctgcatacaagcaagctgatggacggaaagtggatagtaaaagagtacttgtagatgtggagcgtggtagaactgtaccgaattggcggccacggagattgggtggtggattatgttcaacacgggttggaggtgaagaacttaaccaaaagcattctggcagggaccaacaacaaattgcattcgggggacctcctatatctgaggagccaacgattcgggatgaacgacgacatgaacg

SEQ ID NO: 913 - DNA, 303 bp, Lilium asiatic
aaaggacatatgccaggatggcggaatatttaaaaacataattactgacggggggaaatgggagaaccctaaggatcctgctgaagtattcattaaatatgaagttcatctacaatatcgaaagcttttagcaaagtctgatgggtaccagttcacactcagacatggtcattattgtcctgcattctcaaaggctgttacaaccatgaacaaagaagacaaagtgcttttgacagttaacccacaatatgtattttgtgagacggggaaaccagaacatggtgatgaatgtgcatgtacacc

SEQ ID NO: 914 - DNA, 310 bp, Lilium asiatic
ggaaaacccgacccgacgcacgcataacaaaggacatatccaagcctcctaatatcttttataacaaaaataccaattctgaaacttgcgtgaatactaaaacccctgctgaactatccattaaaaatcactctactctaaactacctatatcttttcactaacctttatacttacttgttctcaccaaaaaattctcattttttacctaaataaccaatctatactatacccttaaactcattactaaacccactatagccaccaaatttacactccttaactagtgaaaacattaaaccatcttatga

SEQ ID NO: 915 - DNA, 279 bp, Lilium asiatic
gaaaacccgggccgacgcacgcgtacgaaacgacatatgccatgataaccgtatatttaagaacataataactgacaatggaaaatgggagaactctaaggatcctgctgaaatatacagtaaatattatcttcatctacaatatcgaaagcttttaccaaagactcatggatacgacttctcactcagacatggatattattgacctccactcaaaaagtctgctcataccctgaacactgaatacaaaacgctttttacacttaatccacaatattt

SEQ ID NO: 916 - DNA, 498 bp, Lilium asiatic
  modified_base (422)..(422): a, c, g, t, unknown, or other
  modified_base (435)..(435): a, c, g, t, unknown, or other
ccgggggacccacgcgtccggtgaagaaagccaagcctactgccccaaagctgaagactgcatcgaagccgaaggctgttggacgtcgagcaaagactgttgccaagtcgaaggctgttggacgtccaacaaagactgttgccaagtcgaaggctgttggacgtccagcaaagactgctgccaagtcgaaggcttctgcagcgaagccgaaggctgttggacgtccagcaaagactgctgccaagtcgaaggcttctgcagcgaagccgaaagctgttggacgtccagcaaaggcagctaagacatctgccaaagctgctcctgggaagaagcctaaaactgcgaagaaggctgcagcagtgaagacagccaaataggagctattttctttccttttcttggctctggtcaaggagtggtangcagctgtaaatnggcatcagcttggatattagtgtgttgcgtggttttggtaatggcaagggttgatgacaaaag

SEQ ID NO: 917 - DNA, 338 bp, Lilium asiatic
gcgccatctgtatgttaacgacgggaacaattcgcttcatggtgggcataggggattcaatagtgtcttggggactgtgaaagaaaaagtacatcgtgaaatcccttacatcaaattatactaccatagttttgatggtgaacaaggtttccctggggatcttgatgtgtatgttacctacaagctttcaggacactctgagttggatgtgaccatggaggctaacgccctgaacaaggccaccccagtgaacctcgcacagcacacctactggaacctcggggggcatggcagtggcacaatcctatacaaccatgtccagatctttgcgtcataca

SEQ ID NO: 918 - DNA, 392 bp, Lilium asiatic
gccggagaagacgacccctctcccctccctctcctacccatcagccgagatgcaggatgggggtaatcccgacgcaatcaagcgctacactccccccatgaaccgcgcgcacaacagacgcaaatccggaggagatcaccgggatgctggctgtagtaatattcagaaagagtatgctcatctaggattgattcatttgaatggatgcactttcagtgtggcaagagaagttatgactgaccgttgggtatctgcaatgcgctcgtataatggttcgtcagtggagttatctgaaaaaccaatcctgtatacttcagctagtgggtcatcatggggtcacttcaaactccctcaccagatggattttcttgcagaactgcggcgtaaaatac

SEQ ID NO: 919 - DNA, 465 bp, Lilium asiatic
acgaagcactgagtgtcctgctaaccgtgagcctcaggattgaaaagaggcggagggaggaggggcgccatgaaggcatggagctcccacatattgcatcttctttctcagacaaaatctcagaggagatatgcaattcagccgcaaaaatggctaataatttgggagtggatgctgtgtttgtctacacgaagagtggtcacatggcctcgatcctttcgcgttgccgccctgactgcccgatctttgcattcactacctcgacgtccgtgaggagaaggctgaatctccagtggggccttataccctttcggctgagcttctcagatgatatggatagcaatctgtatcggacttttgctttactcaacgcaaggggaatggtacggtctggaaatctgggcattgccctctctgatatgctgcaatctatccaagtgatgaatgtcccatacgggggaaggg

SEQ ID NO: 920 - DNA, 432 bp, Lilium asiatic
acgaagcactgagtgtcctgcgaaccgtgagcctcaggattgaaaagtggtggggggaggaggggcgccatgaaggcatggagctcccacatattgcatcttctttctcagacaaaatctcagaggagatatgcaattcagccgcaaaaatggctaataatttgggagtggatgcttgtgttgtctacacgaagagtggtcacatggcctcgatcctttcgcgttgccgacctgactgcccgatctttgcattcactacctctacgtccgtgaggagaaggctgaatctccagtggggccttataccctttcggctgagcttctcagatgatatggatagcaatctgtatcggacttttgctttactcaacgcaaggggaatggtacggtctggatatctggtcattgccctctctgatatgcttcagtcta

SEQ ID NO: 921 - DNA, 443 bp, Lilium asiatic
tgcacaaatccaggaaattaaagaggctgttgagcttcctttgacgcatcctgagctctgtgaggacggtgggattaagcctccgaagggtgtgattttgtatggcgagccgggaacggggaagactttgcttgccaaagctgtggctaattcgacatcagcaacctttttgcgtgttgtcggtagtgagttgattcaaaaatacttgggtgatggtcctaagttagtaagagagctggttagggtggccgatgatctctcaccatcaatagttttcattgatgaaataaatgctattggtaccaagagatatgatgctcattcaggtggagaacgtgaaatacagaggaccatgttggaactgctaaaccagttggatggttttgattcaagaagtgatgtcaaggttattctagcaacgaacaaaattgaaactcttgatc

SEQ ID NO: 922 - DNA, 344 bp, Lilium asiatic
ctcttttactgggaggcttgcgtcagtttttatagcttccattgaatggtaagctttcggtccttgggccttggttcttgagttcacattgatccccctgatttctggtggtcttcctttctgctgtgtgttcggagcgatgtatgtctagtgagtcttttcaaattggttcctggtcgagtgtgctggagcagcaccttctgtttgctgatcttgttttcgcctcaagcctcttgtggtagtcatcgtcgtcctatgtctaataagtctgtgtgtgtcggtttgtattgctgttgtggggttgcttttgctcagttcagtttgtaagcctgagttttattggg

SEQ ID NO: 923 - DNA, 412 bp, Lilium asiatic
  modified_base (290)..(290): a, c, g, t, unknown, or other
gggacgacccacgcgtgcggctcacaagctactccttatatatctctatctcattgctttcctttaggaaattaaatctcgagcgggcatttgtctaccccctgcaggaattgcatgaaagacggtggagatttcacgcatgcgagcaaaagctatcaagcaaggaaggaaacgatcatgcacggagggccgagatctgaagaagatgctggatggctctgatgaggtgaaagtacgatgtgcagttctgatctgacggcgaagaggaaggccgtgcatggagcttatanaagcgcatgtggaacgagctctccattggacgcacatgtgaagtgctcgaagcagaagacggtgccgagccgaagtcgaagtctataaaagcacctatccgatcgacgatttctctcaagtc

SEQ ID NO: 924 - DNA, 355 bp, Lilium asiatic
cggacgcgtgggcagggtttaaagggatgttccttccttcagggattctgggtttaaaggggaaaaaagaagtcttattttttttaggcaagtaaattcctctgttgattaggagtaagcaactggagaaattggtactaaatcctatcaacctagtgttcaaagtaggttggtcttgattagttctggataacagcctgagtcaacttcatttttggacactgagacaactgatgtagcattagtcatagaattggcaattatattaatgggtaggggctgaaactgaaagttcttatgtgctctctttggggctcatccgttgattctaacacatattcttacatatattcta

SEQ ID NO: 925 - DNA, 343 bp, Lilium asiatic
accggctcgaatacccggccgacccacgcgtacgcggacgcgtgggcactattctaatttatgttcctcccttcattaatcttctttttcaagtggaaaataaaaaacttgttttttttagccaagtaaattcctctgttaattagaattaaccaacttgaaaaatttgtccttaatcttatcaccctattattcaaactacgtttgacttgataagttctggataacaacctaattcaacttcatttttgaccactgatacaactgatgtacaattaacaatagaatttgcaattatataacttggtacaggctaaacctaaaagatcttacgcgctctttt

SEQ ID NO: 926 - DNA, 369 bp, Lilium asiatic
  modified_base (10)..(10): a, c, g, t, unknown, or other
cccacgcgtncgcggacgcgtgggttgctgctaacattaagtttgagaatactgcagggggaggtggacaagcagtggctgttcggatttcaggcgataaggcagcattctacaactgcagcttttacggggctcaggacacattatatgaccataagggacttcactacttcaacaactgctttattcaaggttctgttgatttcatatttggaaatgggaggtctttatatgaaaactgctacttgaactccatagccaagaataaggcatcaatgacggcccaaagccggagcaacacaacaatcgaaagcggcttctccttcaccaaaagcacagtcagtggaagtggactagtgtacctcggga

SEQ ID NO: 927 - DNA, 369 bp, Lilium asiatic
ctggcaaaatacagtgtgagagatttgcaaagtacctgctcgcccagcttggcgaaattcgccgagagaatcgagggggacacaattatgtcgctcttcgaatacttgtcaacccgtgatgatgctctcacttgaaaattcctcctgaacaccacacaaaaccctaaattctcaatcgctcatgtcaatcgagagaggggaagggagaattcacctgctgggcgtcctgctgctggggacggagaagatgcaccgatccactgttgggcatcctacatgctactcatatgcatgtattactcctcacatctgcttgcatgcatggagtgtatgcagtaggatgccaagctcggtgagctaaaaaaacat

SEQ ID NO: 928 - DNA, 421 bp, Lilium asiatic
gatcactaaaaaggaggcgggacatgttttctggccttaaactaaagcaggaaattctgcattgtcttattgatcagatcattcattctgatgagaatgttgacatcgttaagttacttaagcatctccatcctcaggtaatgttaggaatacctttactggaaggaactaatccagcttcatgttttcctcgcttcgctattggttatgaagctgcttgctatagttacatttggagtgaggcttttgctgctgatatatttgcatcaaaattccaagatgatttgctgaaccagtatgcaggcttgcagttcaggagtaaggtattggctccaggtggggcaaaggaccccctcgagattctatcggactatctcggaagagaaccatcaatccaatcattcatcgaaatcaaaactca

SEQ ID NO: 929 - DNA, 403 bp, Lilium asiatic
gcccccaagcgccctgcttcttcattctttctctttatggatgacttcaagaaggagtgtaatgaggctaaccctgatgccaaggcaggacctgctgttgcaagggagggtggtgagaaatggaaagccatgactgttgaggagaagaaagtgtatgttgataaggctgctgagcttaaggatgagtatgagaaagcaatggagaagtataatgctgagaaaaatggtggtgctgaaattgatgaggctgaggtggatgctgaaaatggtgataatgctgatcatgatgctaagaatgggaaggaaaatgagcttgatgattactgatgaagagtgaattaactggttgtggaagctcttaggccatgtcattaaaagagatgccttttttgttaagcaattt

SEQ ID NO: 930 - DNA, 406 bp, Lilium asiatic
ggatactcaatctgacaacgatttataaggtaaatagaaaatcttgtgtgggaaaaaaaaaaaaaaaaaataagaaatggaaaaaaaataataaataataaaaaattaccctataaaataaaataatatataataataaaataattaaatatataaaattgtatataatataatatgacttataaaaaaaaaggggtggttggtttttaccggtttcggggtggtaaaaatttctccccggtcttagggggccccttttttaaccgtgggttttgttttccccaaaggggtttggactttgttttttccatttttaaaatttccgggaaaaaaaaaagtggcttttatttaaagggttttttgcgggtgtggttttttttggaaggggttttccctaaattttttt

SEQ ID NO: 931 - DNA, 300 bp, Lilium asiatic
  modified_base (234)..(234): a, c, g, t, unknown, or other
ggggggacccacgcgaacgcaggcaaaacacagagcgagagagcagcaaagaaccagcacgcccagcgaggccaaaggcgccgagagaaacgagggggacacaagaaaaagagcgccgccgaacacaagagaacccgcgaagaagcacccacgagaaaacaccaccggaacaccacacaaaacccgaaaacacgcaaacgcaacaagccaaacgagagaggggaagggagaaancacccgcagggcagacccgccgccggggacggagaagaagcaccgagccaacggagggcaaacgac

SEQ ID NO: 932 - DNA, 394 bp, Lilium asiatic
cctcctcatgggtatcaggactacttcaatgatgggtacccggcaccgccacggccgccgccgcggccagaatacgatcactgccaccacagccatgatgatgattgctgttgcttcccttttctaaagggatgtatggctgctctttgctgctgctgtatactggaggaatgctgcttttgatagccgctgcttcggatttgtggtgtcatcttcattagttattctgggtgttcagatggtgactgtgattgttctactcctcctaaagtcgtgttaattctagtggcttggcatacattacttaaatgcttgaaggctacatagaataatgctgcatcgcggcaataaatgttgtgtcaccttgtatcttaatcggtaattggaaggcatt

SEQ ID NO: 933 - DNA, 418 bp, Lilium asiatic
cggacgcgtgggctccattgaaaatgtgacagtcgtccaaatttcaagctctgaagaattaaacactttaatttctagaggattggagcggagacatattgcagggactcacatgaatgctgaaagttcaaggtcacatttaattctttcaattatcattgaaagtaccaatattcagactcagtctcttgttaaaggaaagcttagctttgtagatcttgctggttctgaaaggataaagaagtcaggctcctctggtaatcagttgaaagaagcacaaagtatcaacaagtctctttcggctctcggggatgtgatcggcgctttatcttccgatggacaacacataccctacaggaaccataagttgaccatgctcatgagtgattcactcggtgggaacgcaaaaactcttatg

SEQ ID NO: 934 - DNA, 283 bp, Lilium asiatic
ttgatatatctccatcttcatcgaaagatagcacaaaagttttgccccaaaagcaatcagatagcagaacttcatcaccaaaggaactccctgtattatttcccttttccatgacttcgaacaatgtgccttactcaagcaagcctggtgcacctttttcagcgggaggcaccattcctgttgtgttagagcttccaaaagccacttctgatttatctggtgcgaaagctgcctcatgtggccaacttgctagcctacctgacctttttgagaaagtttacag

SEQ ID NO: 935 - DNA, 358 bp, Lilium asiatic
cgaattgccggatggatccactcttcacggccggtgtttgacttcgacagaaggtttgtggaacccacacttaagagtgtcaatggggcgcaagatcacggggggctgaccttccacactctacttctccgaattcatcaatgtcatcctccatctcttccaactcggctggagttggccctgcccatacaaaactgatacggatctgcacacccagatgactcgacacacctagttcgatgataaaactttcgatatctcgaacccaattgatttggatgctcccaacgcttccttacctccgtacgacagcttgatgcgctaaagcagccactcaaccaatatagttgccccatat

SEQ ID NO: 936 - DNA, 392 bp, Lilium asiatic
ggaagaagctcgtacggtgttcaggagtatgagaagagacaagtgtagccccgacctctgttcttatgcgaccttgatatccgcctatgccaatgccgctgacatggatggagcagaaagattcttccaactgatgaaacaagacgatataaaaccaaatgtcgtcatatatgggaccctgatgaaaggatatgcaaagatgaataacctcgagaaagtaatgcaggtttatgaaaggatgcggatggaaggcatcgaaggcaaccagactatctttactaccatcatggacgcccacggtaaaaactctgatttcgggagcgctactatatggtataaagagatgaatgctcggggacttgaacctgatcagaaagcaaagaacattttac

SEQ ID NO: 937 - DNA, 285 bp, Lilium asiatic
cagttccccatttctccccaattcctagcctcaaaatccccaaattccgaaaccctaaacctaatccgtttcgatggcccgtacgaaacagaccgtccgcaagtctaccggcggaaaggcccctcgcaagcaggttcggcaccaaggctgctcgcaagtctgctccgacgacaggcggagtgaagaagccccaccgctaccgccccggtacggtggcgctgcgtgagatccgtaagtaccagaagagcaccgagcttttcataaggaaacttgccgttcaaaagc

SEQ ID NO: 938 - DNA, 182 bp, Lilium asiatic
gggaacaaaaaaagggcaaaaaaggcagcaagaaagcccaaagagggggccaaaaaagagccaaagggaagccccaaacaaccccagagaagaagagagaagagcaaaaaacgggagaaaaacgaaacaggaacagaaaaaaaccaaaggccccaagaaaaacgacccaaaaaagggcgaaa

SEQ ID NO: 939 - DNA, 411 bp, Lilium asiatic
ccggggggagccacgcggtgcgctgagagtgaataaatatggcattgggtatgtatttgtggggctaatgaagataaacgggcttgggtatagtatctaagacgagccaaatttgggctcgatcacaccccacgttattggcaaaagttaagttaatcaattagccaagtacacaactttaaaagtaaaaagatttttatagggatgagtatatggttaagcattaaaggattaatacttagggttatcaaagattactgatgcacgtgctaagtccactataagaaatataacttcttaagagataaaaggaaaatcgtctctaggtaattaaacaactttttatttcataaaaatagactacctgtaaccactaatttggacaaacaagctaaagtatgagaatttttt

SEQ ID NO: 940 - DNA, 417 bp, Lilium asiatic
  modified_base (53)..(53): a, c, g, t, unknown, or other
cggactcgttggcggtctctttggccgttctccggatactacatcgaattacnagatgcgggccggtcatgggcagcgctcgcgcactctctacctcttcgcccgtcccttcaggaagaaggggtacatcccgttgacgacgtacctccgcacctaccacatcggtgagtatgtggatgtgaaggccaacggcgccatccacaaggggatgcctcacaagttctaccactgccgtaccggtcgcgtctggaacgtcaccaaacgcgccatcggcgtggagatcaataagcatgtggggaacaggattatcaagaagaggatccatgtgcgtgtggagcatgtgatgccctcgaggtgcactgaagaattcaggctgaggaagataaagaacgaccaattgaaggctgaagcaaaagc

SEQ ID NO: 941 - DNA, 419 bp, Lilium asiatic
gtcaaagcactgggaggactgataaccggctctgataaacgaatcttgttcatctgtggggactttatggaggattatgaggttaaggttccatttcaatctctccaggctcttggttgcgtagttgatgcagtctgcccaaacaagggttcaggtgataaatgtccgacagccatccatgattttgaaggtgatcaaacttatagcgaaaaaccgggccatgatttcacactgacggccaattttgaaggaacccatgcttcagactatgatgcattagttataccaggaggacgagcccctgagtatcttgcattggacgagaaagtaattgctttggttaaggagtttatggatagtgggaagccagttgcatctatttgccatggacagcagatcttagcagctgctggagttct

SEQ ID NO: 942 - DNA, 369 bp, Lilium asiatic
tatttatcttgggccacggtcgaggagtatatcaggtgtgacggagaatgggtattgtgctcattactcctttggtaccggtggcaagcgagcccggaagtctgcagttaccagtccttgttaacagaggatgggtccccagagactggaggaataggcctgtagaatattcacaggatgctgatagatcttcgaactcaaaagccgcagatgttcagcatgatgagaaaagcagttggtggagcttttggtctaaaaaacctgcagcccccgaggtcaaagagcctctcattactcctacaagagttattggagtaatccgtggaggggagaaaccgagcatatttgttccagcatatgatcctaata

SEQ ID NO: 943 - DNA, 269 bp, Lilium asiatic
taaattaagaaactcaaatggttcactaccaacttcaagtattcgtcttatatgccgggggtaatgcagaataatggctgctgtgtttcgtactcaagaaacacttgaagaaggttgtcagttgattgacaaagcctgggaaagtttccatgatgttaaagttcgtgatcggagtctgatttggaattctgatttaatagagactataaagcttgagaatcttttgataaatgcatgaataattatgcactctgttaaggcaaggaagg

SEQ ID NO: 944 - DNA, 388 bp, Lilium asiatic
ccttgatgttcaccagctaaaccgaccagacagactacaggatacttcatggcatgacaaagttaatcctgtcaagggtggaatcgtgttctctaatatagttacaacagtatccccaacctatgctcaagaggtgcgcactattgagggaggtcatggtcttcacagcatactgaatcttcactgtaggaaatttgttggaattcttaacggaattgataccgatatatggaatccttcaactgatgcttttcttaaagctcagtacaatgctgaagatcttcagggaaaggcagagaataaatcttttatgagaaaacatcttgagctttcttttgctgatgccatgcaaccctttggtttgttgcattacacgactggtaccaca

SEQ ID NO: 945 - DNA, 411 bp, Lilium asiatic
cggacgcgtgggtcatgttggggatcgcggggtgcttgctagggcgtcgggggattatgcgattgtcatcagtcataatcctgataacggcacttccaggatcaagcttccatctggtgcgaagaagattgtaccaagtggatgcagggcgatgattggacaggttgctggtggcggcaggactgagaagcctcttctgaaggctggaaatgcctatcacaagtaccgtgtgaagaggaactgctggccgaaggtccgtggtgttgccatgaaccctgttgagcatccccatggaggaggtaaccatcagcacattgggcatgcttcgactgtgcggcgtgatgcccctcctgggcagaaggttgggctcattgctgccaggcggactggccggctcaggggacaggctgc

SEQ ID NO: 946 - DNA, 398 bp, Lilium asiatic
gcaccgactcgtcgggttcttataatgcgggcatacaatgcgtgcaaagtgtctttatccgaggcttgggcatgaccaatacgcatgccctatttgctccaagtcagtcattgatatgtgcagaatctggaggaaatctgacgaggagatagatgaaatcctcatgccccaggattaccggctcaaaaaggtgttgatcctatgcaacaactgcaacgacattacaaaagcttggatacatgtcatctgccagaagtgtcttcactgtctgtactacaatactcgctctatcgctccccctgtgcttccttattgcattgtcctaacatcagcaattgatatattcattgtgccatttatatataatcgagcgactaaatgatcttatcatgcatgtt

SEQ ID NO: 947 - DNA, 345 bp, Lilium asiatic
gagaaagagcatgtacattttaaggaaatggaaggaaaaactcgtagcgagttgagaaaactccaggaggaagtgggttgcctgaccgagaaactgcagaatgtcaagttagagtgtgaaggaaaggagaagaaaacccaatctggttaagcacatgttgctttcctttagaaaccaatggaggaactgcttctggagtaccaccgattgttggaggataaccaagtactgcagacccaggccgtatcattcagaagctaagctgagcgctttacatgtgtgctatttaacaacttttctcggaagccaccgtgacgtgctctgttcattttcaagatgtttctg

SEQ ID NO: 948 - DNA, 295 bp, Lilium asiatic
tgctttttatatgtccagtgttgatcctgcacttagtcaagaggtctattttgggaacgtttttattgccaatctgggacattgctccagctaggcaggctgcattaagtgctggaatcccaaattctgtggtctgcactaccataaacaaagtttgtgcttctggaatgaatgctactatgctagctgcgcaaagtatacaactaggtgttaatgatgttgctgtggctggtggtatggaaagcatttcaaatgcccctaaatatttagcataatcaagaaatggatctctatt

SEQ ID NO: 949 - DNA, 408 bp, Lilium asiatic
  modified_base (383)..(383): a, c, g, t, unknown, or other
gtggataacctttctagaggaaatatgggggcagttaaagtcctgcaggagttatttccggagcctgggagacttcaatttattttagctgatttaggagatgcgaaagccgttaaccgcatatttgcagaaaatgcatttgatgccgttatgcactttgcagctgttgcttatgtgggtgagagtacgcttgaacctctgaggtactaccacaacatcacctcaaatacattggttgtcctcgaggcgatggcagcacatggtgttaaaactttgatttactccagcacatgtgcaacttatggcgaacctgaaaaaatgccgattacggaaacaactcctcagttacctatcaacccatatgggaaggccaagaagatggncgaagatatcatcttggatttctcg

SEQ ID NO: 950 - DNA, 317 bp, Lilium asiatic
gtttacctttcctccccaagtcctaatgcggaaaccctaaatcggtgctacgatggcccgtacgaagcagaccggtcgcaagtccaccggcggcaaggccccgcgcaagcagctagccaccaatgctgctcgcaagtctgccccgacgaccggcagattgaagaatccccatcggtacaggcccagcacggtggcactccgtgagatccggaagtaccagaagagcacggagcttctcatcatgaagctgacggtccagaagctggtgaaggagatcgcgcacgatttcaagaccgatcttcgtttccagagtcatg

SEQ ID NO: 951 - DNA, 381 bp, Lilium asiatic
cccaacagtattttgaagcacataacgctggagtacaatgacaacaagcctgtaaccaacagccgtgacactcaggaggtgaaacttgagcagggtcttcgagttctaaagattttcaaggaacatgtaagcaagacgtccattttggatgattttgagttctatgagaacagacagaagttgatgcaagaaaagagggcaagccagcagattcaaaagcaggcatgtcccagatggaaaaactgctgaagctgtggttgatgtgaacaaggaaagtggtgaggctgtatcggtatccgataacaaagatggtgaagctgcaataggcgcggcagttggggatgccacatattcctcggaactgaaggctaatgaaaatgg

SEQ ID NO: 952 - DNA, 286 bp, Lilium asiatic
atttggttccgccgcgactccctctagcccaggaagtaaatcacaatcagagagccgggatcgatcagatggctccggcgctcaaggatttgcagcgcgatctagaatcccaagccgaagccctcggcaagatccagaaagacatcgccaagaatcaccaggtgaggaagcagtacaccatccagctcggcgagaacgagctcgtactcaaggagttggacttgctgaaggaggatgcgaacgtgtacaagctgatcgggccggtgctcgtgaagcaggatcttgc

SEQ ID NO: 953 - DNA, 375 bp, Lilium asiatic
acattccaaagacgatgactccagaggaagtgaagaagctttgtcgagatgcagttctttggcgggctagcaagcaaaatcctgtcattcaagaggtaaagctgttgaatgatgagaagaaaggacaggtcactgtaaagaaacattcacgcggtgttgcttttgttgattttaaggaacatgagcatgcgattgtggcattaagggttcttaataataatcctgaaacttttggtcaggaacgtcgtccaatcgtggagtttgctattgagaacatctagaaactaagacaaaggagactcaagttggaattttcaaagcctaatcttggcaaatcaaatagaaccaacaacgcacaaccgaattctacacctc

SEQ ID NO: 954 - DNA, 229 bp, Lilium asiatic
cggacgcgtgggcggacgcgtggggtgttgagcttgatgattggacttcttgtgttcttatttggtggtgatcctagaagaactctagtttctgacgacgcttatgattacttcgaaagagtcacatttggtggaaaagggaatgcaatcccaggttccatttggagtgattcctggttggcaatgaaaacagtaatgaaggtgcaaacttttaagattattggtttgc

SEQ ID NO: 955 - DNA, 428 bp, Lilium asiatic
cggacgcgtgggttttttttgtgaattttttaggcagtcaggtgagaataaacatcgggggttattaggtcctataattttaggaatatacatgattctattctggttcttatggaaaatcacaaagcaccatctatcaaatttaggattatatctacacagcttacacccctatggtttcacccatgttccaaagaaacccctaaagtttcaaaattgtaagagccttattctgcactccctatcaccggcttgaaactaatagaaataataaatatgaaaagtgagatgttataatttaccgaaaggtctaaaggctaattgaacttagtagttttcaataacaaagcccaaaaaggagtcagaaaacaaggttttcatgaaatgaatctgaatatagcaaggccatcgagccttaattttttttt

SEQ ID NO: 956 - DNA, 376 bp, Lilium asiatic
ggaagactgtcgaggtcaagaagcctattgtggtcaagtatgggcttaatcacatcacatgccttattgagcagaacaaggctcaactggttgtaattgcccatgatgtggacccgattgagcttgtggtttggctacctgccttgtgcaggaagatggagataccttactgcattgttaagggaaaagctagacttggagcgattgttcacaagaaaactgctgctgctctgtgccttaccacagtcaagaatgaggacaagctcgagttcaataaaatcttggaggctattaaagcaaacttcaatgataagtttgatgaggtccggaagaagtggtgaggtggcatcatgggaactaaatctcatgcaaaaac

SEQ ID NO: 957 - DNA, 422 bp, Lilium asiatic
gtaagtcaactgtgaggtgcctctgcgaacatgctttaaaacatggcctgcaatgacgaatttggcttatttaacatattgatcaaacgatcctgcctattcatagctgactgacatatcatggttctcagaatcttggttaacttgagctttgtctacagtcctaagtgtattggcaagtcctatctcttgccaatcatgccatgttcaagtttttgttattgagtttcaactgtgaggtgcctctgcgaacatgctttaaaacatggtctgctatgactaatttggcttatttaacatattgatcaaaccgattctgcctattcatagctgacttagttgactgacagatcatggctcttagaatcttggttaacttgaactttgtctacaatcttaagtgtattggcaagtcctatttc

SEQ ID NO: 958 - DNA, 383 bp, Lilium asiatic
cggacgcgtgggcggacgcgtgggcggacgcgtgggtccgccgaccgccgccgccggaaccctagatctctgtcaccgcaaccctagatcgttgctatggctcgctacgaccgcgcgatcaccgtcttctcccccgacggccacctcttccaggtagagtacgctctcgaagccgtccgcaagggcaacgccgccgtcggcgtccgcggcaccgacacgattgtcctaggcgtcgagaagaaatccgccccaaaactccaagattctagatctgtgcggaaaatcggcaatctggacacgcatattgctctcgcctgcgcagggcttaaggccgacgcccgcgtgctgatcaacaaagcgcggatcgagtgccagagccaccg

SEQ ID NO: 959 - DNA, 263 bp, Lilium asiatic
ctctgttgcacggtctttgattgggactacttcactacctaatttgggcacatatgcccaagctgtagaggttcatttaccgtgctcatctggcaaccacctcccgactgagaatgagttacttgtcaatgagatcgttcatggtggtgttggtactattaattatgacaacattgtctgagatgcgattgatattcatgcaaaaatcatagtatcaatggagactgtattcttggatggaattatatagtctttgaatcaac

SEQ ID NO: 960 - DNA, 391 bp, Lilium asiatic
gatggatttgtcacctccatcaggggactgttcaattctcagcgccgcagggccaaggcattcgtaatgaggactatgagaggagaagcagaacatgaatttcgtggtgagtggagcgagagcgataatgagtcgtctccattcgccagacaactgactataacgaaagctaagaagctcataaggcggcatacaaagaagttccggtcaagaggccaaaagagttcaggagtggtgatccagcaagaatcacttccgtcgactcccagagagaccacaccatttcaaagcgattcatctggttcattgtcatatgaggactttcatgagtagtagagaccagtttgccagagtataccacaaattcatgctttagagaacagactagctt

SEQ ID NO: 961 - DNA, 404 bp, Lilium asiatic
ttgtccttttacggatatatgtttgttttgaaactgcgctgatagaaactgctggggtaaatttctaaacagaaacggaatataacatctgaacccgtaataggtttttgggtttatctgtttgttatctcccctatataaatcaggccagccatccattctaaacacacaatctaagtatatagagaggagtaaaggagactggacaagatgcataaaggtcgaatgaatttctagtcaagggaagcggtatatctgcgatttttcgtatcgagttagagatttttcttgaaatgaccgggctgttaattgaaactgttattcttctattataatcggaaacatctgatgttttagtcttaatattttgctctttgagtaatggtggttggggattgattatt

SEQ ID NO: 962 - DNA, 456 bp, Lilium asiatic
  modified_base (14)..(14): a, c, g, t, unknown, or other
ggtttggaattacngggcggagcgacgcgtccggttgatttacagcttttaggtcaagctttgcaagaaagacagatgaagaagcaaaaggggcgcaggcttcatggtcgtgaagaatatacgctggcaaagctggagagattcaaaaagactctttccacaaagctgtctgcaccatctgctcctgcaccatctgtaccggctaaatctggggagaataatgatgatgatgacgaatccggatggttgacgaacaaattgactttcattccggactcttctgggaaggatgggacgacgagaaaggaggatccaaatgattatattgtgcatgatcctcttctggagaaaggtaaagaaaaattcaatagaatgcaagcaaagcaaaaaccgggaaagagggagttggcttgaaaatctattacttaactatttaacacaataaagttcaattga

SEQ ID NO: 963 - DNA, 398 bp, Lilium asiatic
gagaagcttgcttccgaagaactatgttagcactacacgaaggattttggaattgggggccgtattgagcgttgtcataatatctatggtccttttggaacatggaaaggtggaagggagaaggctcctgctgctttctgtagaaaggctctaacttgcgtcgataagtttgaaatgtggtgagatggactccaaaccagatccttcacattcattgatgaatgcgttgaaagtgtcctgagattgacaaaatcagacttctgggagccagttaacataagaagtgacgaaatggtgagcatgaatgaaatggccgaaatggttctcagttttcatgataagaagcttttccattgagcataattcctgttcctgatggtgatttacggtcccaattt

SEQ ID NO: 964 - DNA, 406 bp, Lilium asiatic
ctctgctgttcctcagatccatcccgtcgttgtctatctaccggtcccccgtcgccattcccatccggatttctcgcttgggagggtgcttgaaagcgtttccgtcatcggagtcgatcaggtcggagaagggattaagagtcggagtgggcggcggcggagggggtagtagcggcagcggcggtagcggaggagaccaaggaggggatcaagagggcgaggagaagacgacaggcgggttgtccatgtctcagaagctcaccctcgcctatgctgccctcgtcggagtgggtggaattatgggatacttgaaaagcgggagtctgaagtcagcaggtgcaggagggctatcctctctggtgctaatttacgtttactcgcaacttccagtgaatcccgttttcgc

SEQ ID NO: 965 - DNA, 393 bp, Lilium asiatic
aagaatcctggcaaaccggcagtctgcagcccgttcaaaagaacggaaagcacgctatatttcagaacttgagcggaaagttgagacccttcaaactgaagctacaactctatctgctcagctgacactattccagagagatacaactgggttgacctcagaaaatgcagagcttaggttaagattacaagctatggagcaacaagctcaactacgtgatgcactgaatgaggcactgaaacatgaagttcaaaggctcaagatcgcaacgggagaaccctcaaaccgcaccgaaacatacaccgtggaactaaatgccccctacaatccttcgatgttcacattttcgcagcacctggctggcgacaaccaacacatgcaactgcatacaca

SEQ ID NO: 966 - DNA, 227 bp, Lilium asiatic
  modified_base (7)..(7): a, c, g, t, unknown, or other
  modified_base (28)..(28): a, c, g, t, unknown, or other
  modified_base (67)..(67): a, c, g, t, unknown, or other
gactagncccagaacgagaacgagaacnaagacacagggagggaaaggaggcggagggagcacgggncaagaaagaaggggaggcggctataggacaaaaacccaccgagacggacacggaccagaacagaggacacgacaacaacagaggacaacagaagccaacagaggagaagagcgcaggagcgggaggcgagggcgcggcaccagggacagagaaaccggca

SEQ ID NO: 967 - DNA, 207 bp, Lilium asiatic
  modified_base (68)..(72): a, c, g, t, unknown, or other
  modified_base (75)..(76): a, c, g, t, unknown, or other
  modified_base (79)..(80): a, c, g, t, unknown, or other
  modified_base (83)..(83): a, c, g, t, unknown, or other
  modified_base (177)..(177): a, c, g, t, unknown, or other
  modified_base (179)..(179): a, c, g, t, unknown, or other
gggggggggggggggggggggggggggggggggggggggggggggggggggggggggggggggggggnnnnnggnnggnnggnaaggggaggggggaggggggggggggagggggggggaggaggggagggaggagggggggggggggggggggggggggggggggggagaagtggngntgggaggggggggggggggggggggggg

SEQ ID NO: 968 - DNA, 435 bp, Lilium asiatic
cggacgcgtgggcggacgcgtgggcttgcggcggcgggagatccagaccaaattaggggttagtcaatcctctgagatgggagtcttcaccttcgtctgtcggagctccggcgatgagtggaccgccaagcccctttccggcgacatcgaggcgtcggctgcgtccacgtacgatctgcagcgcaagctcgtccaggccgccctctccaaggactcctccggcggcgtctcttcctcctttgccctcgtcactccctcctccgccgttttccaggggatcattggaggcggtggtggtggtggagggattggtggaggcggtggcgcatctgctggcgctgcagccggttctgctggtggagctgcagttgctgaggcacctgctgtgggaggaaaagaaggagagagagaagagagtgatgatgatatgggggt

SEQ ID NO: 969 - DNA, 75 bp, Lilium asiatic
ggggggaggggggggggggggggggggggggggggggggggggggaagggggggggggggggggggggggggggg

SEQ ID NO: 970 - DNA, 352 bp, Lilium asiatic
  modified_base (326)..(326): a, c, g, t, unknown, or other
aacggacgtcatgtgctggaattcgcccttagcgtggtcgtggccgttgtacttttagatatggatagttcaggagttgctaaatttccaagaccacacgtcattaaagaggataagtctgcttggcggacggatgaagacttcacgaaagaaatgctggctggagtgaaccctgttaaaattcgtcttctaaatgagttcccttctacaagcatgctagatgcccaagtttatggcaaccaacatcagtcgatgaaattgcaccacgtcgagaagagcttagatgggtttgatagtagatgatgcactgatggcatataagctgntcatattggatcatcatgacacatta

SEQ ID NO: 971 - DNA, 191 bp, Lilium asiatic
  modified_base (5)..(5): a, c, g, t, unknown, or other
  modified_base (7)..(9): a, c, g, t, unknown, or other
  modified_base (14)..(14): a, c, g, t, unknown, or other
  modified_base (21)..(21): a, c, g, t, unknown, or other
  modified_base (24)..(24): a, c, g, t, unknown, or other
  modified_base (32)..(32): a, c, g, t, unknown, or other
  modified_base (55)..(55): a, c, g, t, unknown, or other
  modified_base (72)..(72): a, c, g, t, unknown, or other
  modified_base (74)..(74): a, c, g, t, unknown, or other
  modified_base (83)..(83): a, c, g, t, unknown, or other
  modified_base (89)..(89): a, c, g, t, unknown, or other
  modified_base (111)..(111): a, c, g, t, unknown, or other
  modified_base (123)..(123): a, c, g, t, unknown, or other
  modified_base (128)..(129): a, c, g, t, unknown, or other
  modified_base (131)..(131): a, c, g, t, unknown, or other
  modified_base (138)..(138): a, c, g, t, unknown, or other
  modified_base (142)..(142): a, c, g, t, unknown, or other
  modified_base (164)..(164): a, c, g, t, unknown, or other
  modified_base (175)..(175): a, c, g, t, unknown, or other
gcaanannnaaaancggaaanagnaaagaganaccggagaggcccgaggaaaggncgggcgagggaaaacgngngcagaaacncggggngcagcgggacccaacagcccgnccaacggcagcncaacnnanggagcanccangggggcgagaacaggcaacaancaaagggaagnacaacaggaagaggga

SEQ ID NO: 972 - DNA, 230 bp, Lilium asiatic
  modified_base (9)..(9): a, c, g, t, unknown, or other
  modified_base (21)..(21): a, c, g, t, unknown, or other
  modified_base (39)..(41): a, c, g, t, unknown, or other
  modified_base (67)..(67): a, c, g, t, unknown, or other
  modified_base (72)..(72): a, c, g, t, unknown, or other
  modified_base (96)..(96): a, c, g, t, unknown, or other
  modified_base (102)..(102): a, c, g, t, unknown, or other
  modified_base (120)..(120): a, c, g, t, unknown, or other
  modified_base (126)..(126): a, c, g, t, unknown, or other
  modified_base (128)..(130): a, c, g, t, unknown, or other
  modified_base (132)..(132): a, c, g, t, unknown, or other
  modified_base (141)..(141): a, c, g, t, unknown, or other
  modified_base (162)..(162): a, c, g, t, unknown, or other
  modified_base (178)..(178): a, c, g, t, unknown, or other
  modified_base (207)..(208): a, c, g, t, unknown, or other
  modified_base (225)..(225): a, c, g, t, unknown, or other
cggacgcgngggcggacgcgngggcgccggcaagcaacnnngaagaggccgcacactcgcagagganaacanacaaaaggagaccaccctccacgnggggcngcgccgcaggggaggcangcagancnnngngaagacccncaccggcaagaccagcacccnggagggggagagcgcngatactatagacaaggagaaggcaaaganncaggacaaggagggaanccccc

SEQ ID NO: 973 - DNA, 403 bp, Lilium asiatic
cggacgcgtgggcgccggcctcaaaagggatcccaacgagggagattaatagctagcagtgaatcatgagtaccatgagcgtggagtccaatctgaacccaaatgcccccctctttatcccagccgcataccagcaggtagaggacttctccccagaatggtgggaacttgttaagaccaccggttggttccgcgaccactggttccgccagcaccaggagcaggaaacattcgacggtagtgatgatgctgaaaaggatgtcgtgagcctgctgccagactcctctgatctctttgatgatttctccgaatcagagctagctgatgaaactgtattcggatcagctgctgctaccaatggattgaagggacctggcttggagagtgatgcagaggcattgat

SEQ ID NO: 974 - DNA, 135 bp, Lilium asiatic
  modified_base (13)..(13): a, c, g, t, unknown, or other
  modified_base (28)..(28): a, c, g, t, unknown, or other
  modified_base (70)..(70): a, c, g, t, unknown, or other
  modified_base (98)..(98): a, c, g, t, unknown, or other
aaacccgaaacanggccgccacccaagngccccgagcaacagcgccgggggagaacacgggacccacaanagcgccgaggaggcagggagaacacacnggcagcccgagagccacggaaagcgaccgccaacacc

SEQ ID NO: 975 - DNA, 147 bp, Lilium asiatic
aaaaaaaaaaaaaaaaaaaagaaaaaaaaaagaaaaaaaaaagagagaaaaaaagggggaaagggaaaaaaaaaaaaggggaagggaaaaaagaaaaaaaaaaagaaaagaagaagaaaaaaagaaagaagaaaaagaaaaaagaga

SEQ ID NO: 976 - DNA, 176 bp, Lilium asiatic
  modified_base (2)..(2): a, c, g, t, unknown, or other
  modified_base (5)..(5): a, c, g, t, unknown, or other
  modified_base (8)..(8): a, c, g, t, unknown, or other
  modified_base (11)..(11): a, c, g, t, unknown, or other
  modified_base (14)..(14): a, c, g, t, unknown, or other
  modified_base (28)..(29): a, c, g, t, unknown, or other
  modified_base (35)..(35): a, c, g, t, unknown, or other
  modified_base (38)..(38): a, c, g, t, unknown, or other
  modified_base (41)..(41): a, c, g, t, unknown, or other
  modified_base (50)..(51): a, c, g, t, unknown, or other
  modified_base (60)..(60): a, c, g, t, unknown, or other
  modified_base (78)..(78): a, c, g, t, unknown, or other
  modified_base (92)..(92): a, c, g, t, unknown, or other
  modified_base (112)..(112): a, c, g, t, unknown, or other
  modified_base (115)..(115): a, c, g, t, unknown, or other
  modified_base (121)..(121): a, c, g, t, unknown, or other
  modified_base (125)..(125): a, c, g, t, unknown, or other
  modified_base (133)..(133): a, c, g, t, unknown, or other
  modified_base (143)..(143): a, c, g, t, unknown, or other
  modified_base (146)..(146): a, c, g, t, unknown, or other
  modified_base (154)..(154): a, c, g, t, unknown, or other
  modified_base (164)..(164): a, c, g, t, unknown, or other
  modified_base (166)..(166): a, c, g, t, unknown, or other
cnggnggngcngcngagggcgaaaggcnnaaaagnganganggggcaganncagaagggncagggcacaggaagcaanccgacgacaagacncagaagaacacaaacagcgnggnagaaanggcngacaagcnacgggagagngcngagcgagnacacaccatncncagaggagag

SEQ ID NO: 977 - DNA, 362 bp, Lilium asiatic
cctgacattccaataatgggttcaagaatggcggcggaaagggctgactatctcacccgaacacactcgtccttccttgccaatgggatgaatattgaggcgactatgatgaatgctcatttaccttatggtcacatgttgccctctaatgggtatgccggatatccatctggacaggccttggtatttcctccctcactttatggacctcctgggagcatcccctacatggtagatgctcgaggagctgctgtcctaccacagacactcccaaacggagtaagctctgtgaggcctcatttctttgcaagcggtgcacactcaagtatgtatggtggtggaggaggtggtggtgggggtgc

SEQ ID NO: 978 - DNA, 327 bp, Lilium asiatic
cgacttcatccccgccctctaaatctctaatagcgacctctacctctatcaaaccctacatatgctcctccgttagatcacaaaatcctcaaatctaaccgcacaacaccttctcacatcttccgccaacatccagagaagtctttccacttgtatctcttccaattttggttaattgataggatattgttctaatttgtgtcttgttatttttcaggaatcgatcatgggaggaaacatgcaagatccagcctgagtgatatataaagatgagtattggagctgaatggggcacctctcattagttattacaatggtgggatatca

SEQ ID NO: 979 - DNA, 222 bp, Lilium asiatic
  modified_base (10)..(10): a, c, g, t, unknown, or other
  modified_base (23)..(23): a, c, g, t, unknown, or other
  modified_base (30)..(30): a, c, g, t, unknown, or other
  modified_base (35)..(35): a, c, g, t, unknown, or other
  modified_base (50)..(50): a, c, g, t, unknown, or other
  modified_base (62)..(62): a, c, g, t, unknown, or other
  modified_base (70)..(70): a, c, g, t, unknown, or other
  modified_base (108)..(108): a, c, g, t, unknown, or other
  modified_base (111)..(111): a, c, g, t, unknown, or other
  modified_base (140)..(140): a, c, g, t, unknown, or other
  modified_base (151)..(151): a, c, g, t, unknown, or other
  modified_base (154)..(154): a, c, g, t, unknown, or other
  modified_base (158)..(159): a, c, g, t, unknown, or other
  modified_base (162)..(163): a, c, g, t, unknown, or other
  modified_base (175)..(175): a, c, g, t, unknown, or other
  modified_base (216)..(216): a, c, g, t, unknown, or other
cgccaaggcngcccgggaggcangggggcnacggnacaaggagcgcccgnaccgggacgccncgagcgangaagcacacaacagcggcgcaccaaaggcaaggccggncancaaggccaagccaaaacggacaagggcanaggaacgaggnacncagnngcnncgagggagcagnggcaagggcggcccagagcggaagaaagcagcgacagcagngaaagc

SEQ ID NO: 980 - DNA, 367 bp, Lilium asiatic
cgccaagtctgcccggaatgcattggggctacggtacaagttgctcccgtaccgctacaccttgagctatgaagctcacatcagcggcgcaccaattgcaaggccggtcttcttttcctttcctaattttacaaggtcatatgaacttagtactcagtttcttctagggagcagtgtcgtgggctgcccaggcctcaagaaagcatcgacatcagtgaaagcgttgtggcctccggggacatggtataattggttcgacatgagcaaggcggtgggatccaaaggggatcgctatgtgtcgcttgatgctccacggaatgtgggcaatgtgcatgtataccagaatgccatacttgcgatgcagcaa

SEQ ID NO: 981 - DNA, 171 bp, Lilium asiatic
  modified_base (9)..(9): a, c, g, t, unknown, or other
  modified_base (26)..(26): a, c, g, t, unknown, or other
  modified_base (118)..(118): a, c, g, t, unknown, or other
  modified_base (158)..(160): a, c, g, t, unknown, or other
  modified_base (166)..(166): a, c, g, t, unknown, or other
cggacgcgnggggacgaaagggcgcngcaagcgggagaagcaggcgaggcggagaagcggaagggggacacgcagagcgggagaagcccagcacagaagcagaggaagggagagaggnagaaggagagcagacacaagaacacaccgaacaagagcannncaaagngcaag

SEQ ID NO: 982 - DNA, 223 bp, Lilium asiatic
  modified_base (2)..(2): a, c, g, t, unknown, or other
  modified_base (5)..(5): a, c, g, t, unknown, or other
  modified_base (7)..(7): a, c, g, t, unknown, or other
  modified_base (9)..(11): a, c, g, t, unknown, or other
  modified_base (15)..(15): a, c, g, t, unknown, or other
  modified_base (17)..(17): a, c, g, t, unknown, or other
  modified_base (30)..(30): a, c, g, t, unknown, or other
  modified_base (61)..(61): a, c, g, t, unknown, or other
  modified_base (69)..(69): a, c, g, t, unknown, or other
  modified_base (71)..(71): a, c, g, t, unknown, or other
  modified_base (73)..(73): a, c, g, t, unknown, or other
  modified_base (86)..(86): a, c, g, t, unknown, or other
  modified_base (98)..(98): a, c, g, t, unknown, or other
  modified_base (103)..(105): a, c, g, t, unknown, or other
  modified_base (110)..(110): a, c, g, t, unknown, or other
  modified_base (122)..(122): a, c, g, t, unknown, or other
  modified_base (138)..(138): a, c, g, t, unknown, or other
  modified_base (143)..(143): a, c, g, t, unknown, or other
  modified_base (147)..(147): a, c, g, t, unknown, or other
  modified_base (166)..(166): a, c, g, t, unknown, or other
  modified_base (168)..(168): a, c, g, t, unknown, or other
  modified_base (205)..(206): a, c, g, t, unknown, or other
  modified_base (210)..(210): a, c, g, t, unknown, or other
  modified_base (214)..(214): a, c, g, t, unknown, or other
  modified_base (216)..(216): a, c, g, t, unknown, or other
cnggncnannnaccncnagaaagcagaaancgacgcccgaaggaggggcaagagggaggangggaggcnancnccacggaggcacnggcacagggagnagaannncagcnaggaagggcgcnggaaggggaaaaggcnaccangccngggaagagaaggggggcgngngaggagggaggcgaccggggcgaggcgcactacagcnngacnggangngacacca

SEQ ID NO: 983 - DNA, 304 bp, Lilium asiatic
tcacatgtaagaaaccttagcgaacgggacatctcatcaataccgcgctgtataggtgatccacataagcaccactttgttgtagctctatgaccacaacatgattcagacatacgtgtactgctatgacaaatagtgtgagctacatgtaatactactcttaaccacttaactgtatcatgagtacacacgtcatgctagcttcttaacatatagtcaccataagaaggcatcttcatgaggtgctaacggcttgatcactatccctaaaaatcatgttggagaacaccactttcgattcttg

SEQ ID NO: 984 - DNA, 349 bp, Lilium asiatic
  modified_base (203)..(207): a, c, g, t, unknown, or other
  modified_base (211)..(211): a, c, g, t, unknown, or other
  modified_base (216)..(216): a, c, g, t, unknown, or other
  modified_base (220)..(220): a, c, g, t, unknown, or other
  modified_base (232)..(232): a, c, g, t, unknown, or other
ggggggggcgggggggggcggggggggggggggggggccgggggggtggggggggggggggggggggggggcggggggggggcggggggtgggggtcctggttttgctcgtctggggggggggggggcgcgtcgcgggggggggggggggggggggggggggtggggggggggggggggggggggggggggggggggggggannnnncgcntggcncggngaggggggaggnaggggggggggagaggggggggggggggtagggggaggaggagggggggaggggggggggggagggggggggtgggggtggggggggggaggggggggggggggggggggggggggg

SEQ ID NO: 985 - DNA, 289 bp, Lilium asiatic
tggagagtccctgtgcatgcagcggcagcttgaagtatgctcatagggcttgcgtgcagcgctggtgcaacgagaaaggtgatataacttgtgagatctgccatgagtcatacaagcctggttacacggcacctcccagagctaatccagatgagaccaccattgatattagtggaggttggacaatcactggtagtgccttggatttacgtgatccccggatacttgcaatggcagcagcacagaggcactttcttgaggctgaatatgatgaatacgctgctacaaa

SEQ ID NO: 986 - DNA, 227 bp, Lilium asiatic
  modified_base (27)..(27): a, c, g, t, unknown, or other
  modified_base (43)..(43): a, c, g, t, unknown, or other
  modified_base (47)..(51): a, c, g, t, unknown, or other
  modified_base (66)..(66): a, c, g, t, unknown, or other
  modified_base (71)..(71): a, c, g, t, unknown, or other
  modified_base (73)..(73): a, c, g, t, unknown, or other
  modified_base (122)..(124): a, c, g, t, unknown, or other
  modified_base (127)..(130): a, c, g, t, unknown, or other
  modified_base (210)..(210): a, c, g, t, unknown, or other
ggggggggggggggggggggggggggngggggggggggggggngggnnnnnggggggggggggggnggggngnggggggggggggggggggggggggggggggggggggggggggggggggnnnggnnnngggggggagggggggggggggggggggggggagggggggaggggggagggggggggggggggggggggagggaggagggnagggggggggggggggg

SEQ ID NO: 987 - DNA, 273 bp, Lilium asiatic
  modified_base (37)..(37): a, c, g, t, unknown, or other
cggacgcgtgggcggacgcgtgggcggacgcgtgggnttttttttggtcacaagcagggtattgggggattaatgcggaaaagggttaggcgtcgagattggccaggtcagcataacaaacacccagatacattatacacaccaaaaaaatgtatgctgaaacagctgctctcacaacattatccaatctaccagtttagcgtgcagcattacatcttattttatatccctcttgagtaacctgattacataggtcaaactatacataacttt

SEQ ID NO: 988 - DNA, 203 bp, Lilium asiatic
  modified_base (67)..(67): a, c, g, t, unknown, or other
  modified_base (92)..(93): a, c, g, t, unknown, or other
  modified_base (99)..(99): a, c, g, t, unknown, or other
  modified_base (160)..(160): a, c, g, t, unknown, or other
  modified_base (188)..(188): a, c, g, t, unknown, or other
  modified_base (190)..(190): a, c, g, t, unknown, or other
cggaaggcccggggcgacccacgcgaccggcaccggcgaaccggagaacaacgcgcacgagcaaacnccggcgcgcaagcgaacgcagggcnngccganaggaaaggaaaaagggagcaaacagagggcaccccccagcaggaaaagcaggaaggacggnggagaaaacacgcaggcgagcaagagcnancaagcaaggaagg

SEQ ID NO: 989 - DNA, 276 bp, Lilium asiatic
ctttcgatcggccgttctggtacgtacaaaaatgaaccttcaaaatgaaggtcatcataaccaaaaaaagacaaaagtaaataaaatgggggattaacttctttcccacctatcaaacgtaaaaagcctttaaacatcatcaaacaaaatatactaactaaattttagcggacttcatttgccaaacgctaactgacgctgtaaccgttgctgctgttgcattgttgaacaaaaacagttgagcattgccgtatatcgcctttgttggatacactc

SEQ ID NO: 990 - DNA, 59 bp, Lilium asiatic
ggggggggggggggggggggggggggggggggggggtgggggggggggggggggggggg

SEQ ID NO: 991 - DNA, 336 bp, Lilium asiatic
  modified_base (297)..(297): a, c, g, t, unknown, or other
gaaaacgcggtcggagcaacgcccgttccgaaccaagagaaatacatcatatgtgtctccttgctgtgaaggcaaaaagagccataccctgatggttttaacaggactgctcaaagcaggcccgcacctcatactgacagaaaccctcaatcatcaaatataagctatctgctagctgatcccagcgaggctggcaatgcacatgccgatccaagaacataagcaaaacccctctacaagatatttggcgccatctgctctatcgtgtcagacaccgaacgtactcgtgcacacttnctttcaagagtgccagcccacaccttagaaactaacctt

SEQ ID NO: 992 - DNA, 161 bp, Lilium asiatic
  modified_base (12)..(12): a, c, g, t, unknown, or other
  modified_base (16)..(16): a, c, g, t, unknown, or other
  modified_base (20)..(20): a, c, g, t, unknown, or other
  modified_base (22)..(22): a, c, g, t, unknown, or other
  modified_base (40)..(40): a, c, g, t, unknown, or other
  modified_base (44)..(44): a, c, g, t, unknown, or other
  modified_base (56)..(56): a, c, g, t, unknown, or other
  modified_base (72)..(72): a, c, g, t, unknown, or other
  modified_base (93)..(93): a, c, g, t, unknown, or other
  modified_base (96)..(96): a, c, g, t, unknown, or other
  modified_base (105)..(105): a, c, g, t, unknown, or other
  modified_base (113)..(113): a, c, g, t, unknown, or other
  modified_base (117)..(117): a, c, g, t, unknown, or other
  modified_base (120)..(121): a, c, g, t, unknown, or other
  modified_base (125)..(125): a, c, g, t, unknown, or other
  modified_base (132)..(132): a, c, g, t, unknown, or other
  modified_base (134)..(135): a, c, g, t, unknown, or other
  modified_base (140)..(140): a, c, g, t, unknown, or other
  modified_base (142)..(142): a, c, g, t, unknown, or other
  modified_base (146)..(147): a, c, g, t, unknown, or other
cgcacccgcgangaancagncnagccagcacgccacgccngacncgggcgcggacnccgacgagccaccgcncgccggcggcgagaaccacancgncccgccgcncaaccccnccanggnngacnacggcancnnccgcncnggcnnccccggcgccgcca

SEQ ID NO: 993 - DNA, 262 bp, Lilium asiatic
  modified_base (31)..(32): a, c, g, t, unknown, or other
  modified_base (231)..(231): a, c, g, t, unknown, or other
gtggcaactccgtgatcgcgatgtttgcgcnnccctagcaccatgttatgttatgacattcttgagtgatcaaactctctgctgctttttacattatgttttcatgcttttatcaatgtgtgcgacaccttagcactatgttatgccatatccttgagtatttaacagagagttctgtatatatctattatctgcttccttttgaaaaaaaaaaaaaaaaaaaaaaaaaanaaagtgtttgttgttgtttttttgttgtttg

SEQ ID NO: 994 - DNA, 302 bp, Lilium asiatic
  modified_base (7)..(7): a, c, g, t, unknown, or other
  modified_base (15)..(15): a, c, g, t, unknown, or other
  modified_base (21)..(21): a, c, g, t, unknown, or other
  modified_base (27)..(27): a, c, g, t, unknown, or other
  modified_base (29)..(31): a, c, g, t, unknown, or other
  modified_base (51)..(51): a, c, g, t, unknown, or other
  modified_base (69)..(69): a, c, g, t, unknown, or other
  modified_base (87)..(87): a, c, g, t, unknown, or other
  modified_base (114)..(114): a, c, g, t, unknown, or other
  modified_base (117)..(117): a, c, g, t, unknown, or other
  modified_base (126)..(126): a, c, g, t, unknown, or other
  modified_base (134)..(134): a, c, g, t, unknown, or other
  modified_base (150)..(150): a, c, g, t, unknown, or other
  modified_base (156)..(156): a, c, g, t, unknown, or other
  modified_base (162)..(162): a, c, g, t, unknown, or other
  modified_base (179)..(179): a, c, g, t, unknown, or other
  modified_base (197)..(197): a, c, g, t, unknown, or other
  modified_base (213)..(213): a, c, g, t, unknown, or other
  modified_base (244)..(244): a, c, g, t, unknown, or other
  modified_base (248)..(248): a, c, g, t, unknown, or other
  modified_base (251)..(252): a, c, g, t, unknown, or other
  modified_base (255)..(255): a, c, g, t, unknown, or other
agcaacncaggaagnaaccgnagaaangnnngcaacacaggaaggaaccanggaggcgcgagggaaaanggaagcaggacagcccgnaagggccgagggcgaaaaacggaggangcnaagggaaangcagaaanaaacggaaacagcggnggcganggaagngggggcagcagcagagncgaacaggacaggcgcgngcagcgagcaaacccnaacccaaggcccgagggcgggaggggagggncaanccnnganggcaccaaaggccgagaagaagcccgccgccaagaagccggcggcga

SEQ ID NO: 995 - DNA, 459 bp, Lilium asiatic
gaccacgcgtccgggacgcgtggggaccacctcctgtatcatcacagacaggacctgcatctcaaaatactagcgcctccatatcggattcacctgcaagttcattttcgggcctgattggtacacttgtagcacagggtctgattaagctgacccctcctggtcaatctcagtcgaactttcaggattctgtgggggttgagtttaacgtggaacttcttaaggtccgacatgaacctgttgtagatgctttgtattctgatcttcctagacaatgcacaacatgtggcttgcgtttcaagtgccaagaagagcacagtagtcacatggattggcatgtagctaaaaaccggatatccaagaatcgcaagcagaaaccttcacgtaaatggtttgtaagtgcgaaggaatggctcagtggtgcagaaatactaggaactgatgctgttcctggatttt

SEQ ID NO: 996 - DNA, 451 bp, Lilium asiatic
  modified_base (38)..(41): a, c, g, t, unknown, or other
  modified_base (260)..(260): a, c, g, t, unknown, or other
gttttatgaacctttatacaccaagcgatgtgaaattnnnnatggtgtggttgaagtggaaggtgtagcaattgaagcaactgatggaaattctgctgaagagaaaggtgtgcctcatttctggttaaatgcactgaaaaccaacgaagttcttgctgatgagattcaagagcgtgatgaaggagctctgaagttcctcaaggacataaaatggtgcaaaatagataatccaaagggtttcaagcttgagttttactttnatacaaacccttacttcgagaattctgttctcacgaaaacatatcacatgattgatgaagatgatccaattctagagaaagcaatagggactaagattgtatggtatccaggcaagtgcttgacccagaaaactatggtaaagaagccaaagaatggatctaagaatactaagcccatcacaaaaacagag

SEQ ID NO: 997 - DNA, 425 bp, Lilium asiatic
  modified_base (389)..(389): a, c, g, t, unknown, or other
ggcttatcagcccccttcatgggcctcccatctcaacccaatcccttctcagatctactctgtgggacatctggccacgcctattcacaaatggaaccttcctcatttaccagagggtaccgaagtgtggattaagcgtgatgatctttcaggaatgcaattgagtgggaacaaggtcaggaagttggagttcttgatggctgatgctgtgtcccaaggtgcagactgtattattactgtaggaggtattcaaagcaaccattgccgagcgactgccgttgctgcaaagtatttgaatcttgattgttatttaattttacgtacctccaaggtttttgtggacaaagatcctggtatggttggaaatctccctgttgaacggctagtangagcacatattgaactcgtctctaaagaagatatgc

SEQ ID NO: 998 - DNA, 431 bp, Lilium asiatic
ggactaactttattcaaaaggttctataaaatttggcaacatattactagataaagatatgggctaactattggagagtatctatatatacatgacttattacaagggtcatcctgactcaagtgacccatagttttatcaagttattctttggacataaatactaaatattaaagcacatcacaagagcatgagggaaactgacatccttacttaatagagttgagttttctcccaacttgtgagtatgataagtatatcctctacatcacttaagttttattacccactaataatataaattcataaaacatactaattaataatgatataacaaattcagctataatagatcagtcatgttagattttaatcatgtttgatttgtgttacacttaaattgaattatattttctttcaaacttaatgat

SEQ ID NO: 999 - DNA, 390 bp, Lilium asiatic
  modified_base (1)..(1): a, c, g, t, unknown, or other
ngcaggctatacctcatgaatcttttacacacattgatggccagaaccaaggtgttcacattggtcagaatgacttgtttccctgtccttcttgttaatgtcgcatctggtgttagtataatcaaggttgatgggcatgggaaatttcagcgagtaagtgggacaaatgttggtggtggtacgtactggggattggggaggctaatgacgaagtgcaaaagttttgatgagttgctagagttgagccagcgtggagacaatagcaccatggacatgcttgtaggagacatatatggtggtctggactactccaagattggcctttcagcatctacaattgcctctagttttggaaagaataatttcataaaacaaggagctatcaaatta

SEQ ID NO: 1000 - DNA, 204 bp, Lilium asiatic
  modified_base (13)..(13): a, c, g, t, unknown, or other
  modified_base (17)..(17): a, c, g, t, unknown, or other
  modified_base (23)..(23): a, c, g, t, unknown, or other
  modified_base (26)..(26): a, c, g, t, unknown, or other
  modified_base (35)..(35): a, c, g, t, unknown, or other
  modified_base (37)..(38): a, c, g, t, unknown, or other
  modified_base (59)..(59): a, c, g, t, unknown, or other
  modified_base (74)..(74): a, c, g, t, unknown, or other
  modified_base (85)..(86): a, c, g, t, unknown, or other
  modified_base (94)..(94): a, c, g, t, unknown, or other
  modified_base (96)..(96): a, c, g, t, unknown, or other
  modified_base (102)..(102): a, c, g, t, unknown, or other
  modified_base (125)..(125): a, c, g, t, unknown, or other
  modified_base (130)..(130): a, c, g, t, unknown, or other
  modified_base (134)..(134): a, c, g, t, unknown, or other
  modified_base (158)..(158): a, c, g, t, unknown, or other
  modified_base (164)..(164): a, c, g, t, unknown, or other
  modified_base (175)..(175): a, c, g, t, unknown, or other
  modified_base (177)..(178): a, c, g, t, unknown, or other
  modified_base (188)..(188): a, c, g, t, unknown, or other
  modified_base (191)..(192): a, c, g, t, unknown, or other
gggcggacgcacngcgngaagcncgngcaccgccncnncccggaaggagacccagagcnggggccggaccacgnaccacacacgnngaagaagngncacacngagaacccggacccgaaggcggnacagnacgnccgcaacgacaggggcacgccganggggcnggacaacaacnannaccgcaacanccnngacaacaagggg

SEQ ID NO: 1001 - DNA, 277 bp, Lilium asiatic
  modified_base (15)..(15): a, c, g, t, unknown, or other
  modified_base (20)..(22): a, c, g, t, unknown, or other
  modified_base (24)..(24): a, c, g, t, unknown, or other
  modified_base (26)..(26): a, c, g, t, unknown, or other
  modified_base (37)..(38): a, c, g, t, unknown, or other
  modified_base (44)..(44): a, c, g, t, unknown, or other
  modified_base (57)..(57): a, c, g, t, unknown, or other
  modified_base (73)..(73): a, c, g, t, unknown, or other
  modified_base (76)..(76): a, c, g, t, unknown, or other
  modified_base (86)..(86): a, c, g, t, unknown, or other
  modified_base (91)..(92): a, c, g, t, unknown, or other
  modified_base (95)..(95): a, c, g, t, unknown, or other
  modified_base (98)..(99): a, c, g, t, unknown, or other
  modified_base (103)..(103): a, c, g, t, unknown, or other
  modified_base (106)..(106): a, c, g, t, unknown, or other
  modified_base (116)..(116): a, c, g, t, unknown, or other
  modified_base (118)..(118): a, c, g, t, unknown, or other
  modified_base (120)..(120): a, c, g, t, unknown, or other
  modified_base (122)..(122): a, c, g, t, unknown, or other
  modified_base (134)..(134): a, c, g, t, unknown, or other
  modified_base (142)..(142): a, c, g, t, unknown, or other
  modified_base (151)..(151): a, c, g, t, unknown, or other
  modified_base (160)..(160): a, c, g, t, unknown, or other
  modified_base (173)..(173): a, c, g, t, unknown, or other
  modified_base (177)..(177): a, c, g, t, unknown, or other
  modified_base (183)..(183): a, c, g, t, unknown, or other
  modified_base (187)..(187): a, c, g, t, unknown, or other
  modified_base (193)..(193): a, c, g, t, unknown, or other
  modified_base (200)..(200): a, c, g, t, unknown, or other
  modified_base (214)..(214): a, c, g, t, unknown, or other
  modified_base (217)..(219): a, c, g, t, unknown, or other
  modified_base (222)..(222): a, c, g, t, unknown, or other
  modified_base (229)..(229): a, c, g, t, unknown, or other
  modified_base (235)..(235): a, c, g, t, unknown, or other
  modified_base (256)..(256): a, c, g, t, unknown, or other
  modified_base (262)..(262): a, c, g, t, unknown, or other
  modified_base (270)..(271): a, c, g, t, unknown, or other
cagaagggaagaganacaannncncnccgacggaggnnaccccnggagaccccgcancacgggagaagagccngcngcgcagcgangcccnncgngannacanacncaacaccagngncnanccaagagagcancaacggcncaaggaacngagggaagngacggaaaaacanccanggggangganaagcgngccaccngaggaagggcaacnccnnnccncggggcnaaagcncaagaaggcaaagaagaccanagagangggggggnncacagg

SEQ ID NO: 1002 - DNA, 250 bp, Lilium asiatic
  modified_base (2)..(3): a, c, g, t, unknown, or other
  modified_base (12)..(12): a, c, g, t, unknown, or other
  modified_base (16)..(16): a, c, g, t, unknown, or other
  modified_base (19)..(20): a, c, g, t, unknown, or other
  modified_base (23)..(23): a, c, g, t, unknown, or other
  modified_base (27)..(31): a, c, g, t, unknown, or other
gnngaggaaacncacngcnngcnggcnnnnnaaaaaaaaaaaaaaaaaaaaaaaggaaaagggaaaaaaaaaaaaaaaaaaaaaaaaaaaaaaaaaaaaaaaaaaaaaaaaaaaaaaaaaaaaaaaaaaaaaaaaaaaaaaaaaaaaaaaaaaaaaaaaaaaaaaaaaaaaaaaaagaaaaaagaaaaaaaaaaaaaacagggggggggggccccccaaaagggcaagaaaagggggggggggggggggg

SEQ ID NO: 1003 - DNA, 283 bp, Lilium asiatic
  modified_base (7)..(8): a, c, g, t, unknown, or other
  modified_base (52)..(52): a, c, g, t, unknown, or other
  modified_base (60)..(60): a, c, g, t, unknown, or other
  modified_base (81)..(81): a, c, g, t, unknown, or other
  modified_base (109)..(109): a, c, g, t, unknown, or other
  modified_base (132)..(132): a, c, g, t, unknown, or other
  modified_base (139)..(140): a, c, g, t, unknown, or other
  modified_base (142)..(142): a, c, g, t, unknown, or other
  modified_base (145)..(145): a, c, g, t, unknown, or other
  modified_base (152)..(152): a, c, g, t, unknown, or other
  modified_base (156)..(156): a, c, g, t, unknown, or other
  modified_base (163)..(164): a, c, g, t, unknown, or other
  modified_base (168)..(170): a, c, g, t, unknown, or other
  modified_base (175)..(175): a, c, g, t, unknown, or other
  modified_base (177)..(177): a, c, g, t, unknown, or other
  modified_base (181)..(181): a, c, g, t, unknown, or other
  modified_base (184)..(184): a, c, g, t, unknown, or other
  modified_base (186)..(187): a, c, g, t, unknown, or other
  modified_base (209)..(209): a, c, g, t, unknown, or other
  modified_base (243)..(243): a, c, g, t, unknown, or other
  modified_base (249)..(249): a, c, g, t, unknown, or other
  modified_base (256)..(256): a, c, g, t, unknown, or other
  modified_base (282)..(282): a, c, g, t, unknown, or other
ggggccnnggcaacccaagacccaaccagggggggggaagggcaagaaaccncaaacaangcccgaagaccgaaacccggncgccagaagcagaaaacggacaacaaancgcacccaccccaaacaaagggncacaacnngngancgagggnagcnagaaagnnagcnnncacgncnaaanccncnncggaccccaagaaccaaaaacnggggaaagaacgcggaaaagaagccagagaaccngaaccnaagcggnggcggaaggagaagaaaagaacgggnc

SEQ ID NO: 1004 - DNA, 343 bp, Lilium asiatic
ttacacacatatatggccagaatcaagagtgttcacatagatcagaatgactactttcccttccttcttgctaatgacacatctgatgctagcataatcaagggtgatgggcatgggaaatttcaactagtaagtagtacaaatggctttcgtgatacttactgtggattgtagacgctcatgacgaaatgcataatatgagaaaaaaactaaaaatgggccaccgctctaacagatccacccttaccatcccgggcatacacatatatagctctcttatctactcaactatatgccattcaccatccaccattgcacatcgtcttgacaagaaaaaccctga

SEQ ID NO: 1005 - DNA, 329 bp, Lilium asiatic
  modified_base (28)..(28): a, c, g, t, unknown, or other
cgggccgacccacgcgtacgcggacgcntggagacatttttaggaccagcttattccaaacttgtatcgggtcatcctggcgtgggatattaaccttattgattcacatcctactttctctaagtattctttacaaagataggtagcacaatcacataacacaccattaactctttatcatctttaagatttatgcaatacaaatatacctcctctcaacactctttttcaaaaacacccccctacactaacctatgacaaatgatggataatgagaacgtcttttaaacactatcaatttctttaacataaaccattctcgtggacac

SEQ ID NO: 1006 - DNA, 407 bp, Lilium asiatic
gggaaatggaatggagatccagaagacaaaggtattcaaaccactgaggactataggttctatgcaatctcgcgtgagttccctgggttcagcaacaaagataagactcttgtgttccagttctctgttaagcacgaacagaagctcgactgtggtggtggttacatgaagctgctcagtggtgatgttgatcagaagacattcatcggcgagaccccctatagtatcatgtttggaccggatatttgcgggtacagcaccaagaaagctcatgccattcttacacgcaatgttgtacatcacttgatctagaaagacgtcccatgtgaaacggaccaacttactcatgtctacaccttcatcatccgttcagatgctacttatagcattcttggtgatatcactga

SEQ ID NO: 1007 - DNA, 239 bp, Lilium asiatic
  modified_base (7)..(7): a, c, g, t, unknown, or other
  modified_base (10)..(10): a, c, g, t, unknown, or other
  modified_base (15)..(15): a, c, g, t, unknown, or other
  modified_base (28)..(28): a, c, g, t, unknown, or other
  modified_base (31)..(31): a, c, g, t, unknown, or other
  modified_base (36)..(38): a, c, g, t, unknown, or other
  modified_base (47)..(48): a, c, g, t, unknown, or other
  modified_base (50)..(50): a, c, g, t, unknown, or other
  modified_base (78)..(78): a, c, g, t, unknown, or other
  modified_base (83)..(83): a, c, g, t, unknown, or other
  modified_base (90)..(91): a, c, g, t, unknown, or other
  modified_base (93)..(93): a, c, g, t, unknown, or other
  modified_base (97)..(97): a, c, g, t, unknown, or other
  modified_base (99)..(99): a, c, g, t, unknown, or other
  modified_base (102)..(102): a, c, g, t, unknown, or other
  modified_base (106)..(107): a, c, g, t, unknown, or other
  modified_base (117)..(117): a, c, g, t, unknown, or other
  modified_base (124)..(126): a, c, g, t, unknown, or other
  modified_base (140)..(140): a, c, g, t, unknown, or other
  modified_base (150)..(150): a, c, g, t, unknown, or other
  modified_base (153)..(153): a, c, g, t, unknown, or other
  modified_base (166)..(166): a, c, g, t, unknown, or other
  modified_base (169)..(169): a, c, g, t, unknown, or other
  modified_base (174)..(174): a, c, g, t, unknown, or other
  modified_base (177)..(177): a, c, g, t, unknown, or other
  modified_base (180)..(180): a, c, g, t, unknown, or other
  modified_base (185)..(185): a, c, g, t, unknown, or other
  modified_base (190)..(190): a, c, g, t, unknown, or other
  modified_base (192)..(193): a, c, g, t, unknown, or other
  modified_base (202)..(202): a, c, g, t, unknown, or other
  modified_base (207)..(207): a, c, g, t, unknown, or other
  modified_base (223)..(223): a, c, g, t, unknown, or other
  modified_base (229)..(229): a, c, g, t, unknown, or other
caacagnacnccagngaccaccaacagnacnccagnnnccagcaccnncncccacagggcgggcaccggccagaaaancaaanccccccnnanacananccnaacnnccaaacccanccaagcnnnaaggacagcacccngccgggggcnccnagccaccagcccnacnacacnggnccngacangggcnanncccaccaancggcncccccagcccccgacnacccanggaccaaaca

SEQ ID NO: 1008 - DNA, 427 bp, Lilium asiatic
  modified_base (253)..(253): a, c, g, t, unknown, or other
cgccgccatgaccgctcatacccaggaggtttttctagctgctcatctcgagcagcagaagatcgatccggatgagccgacggtagaagatgacgatggtgatgatgaggatgaagatgatgatgacgacaaagatgaggatgatgctgatggagatgctagcggtaggtcgaagcagagtagaagtgagaagaagagccggaaggccatgctgaaactcgggatgaagcccattctcggtgttagtcgcgtnactgtaaagaagagcaagaatatattgttcgttatttcgaaacctgatgttttcaagagccctgcatcagacacgtacgtagtctttggtgaggccaagatcgaggacctgagctctcagctgcagacacaggccgctgaacagttcaaggtccccgatatgagtcatgtactc

SEQ ID NO: 1009 - DNA, 457 bp, Lilium asiatic
  modified_base (39)..(39): a, c, g, t, unknown, or other
cggacgcgtgggtcattggaggcacaaatgtcaccccanggtatttcaagaatgaagagaagaccaaggaagtgtacaaggttgacaaaagggggatgcgttggttctacactggtgacatcggtcaattccatcccgatggttgtcttgaaatcattgatcgtaagaaggatattgtaaaacttcaacatggagaatatgtttctctgggaaaggttgaggctgctctcagcgtgtgcccttatgtcgacaacatcatggtgcatgctgatccttttcacagcaattgtgtggctattgtggtagctgcacgtgctgcagtggaaaactgggcttcaaagcaaggaatcacatatactgattttgcagatttatgtcagaaagaagaaaccgtgaaagaagtgcaagcatcattagcaaaggctgcgaaacaagcgccgttggagagatttgagat

SEQ ID NO: 1010 - DNA, 391 bp, Lilium asiatic
  modified_base (36)..(36): a, c, g, t, unknown, or other
  modified_base (114)..(114): a, c, g, t, unknown, or other
cggaaacccgggccgacgccgcgtccgatacgcggngcccatttttacaaccatcttattccatactgttaccggtccatccattcggaggaaactaacttgattgaggcaccnccagaccaccctgagtatgctttgaagaagcacgaagcacaatcacagaacagacaatcaactctttaggatcatgaacattcatgggatacacgtatacctcgaataaacactccattacaaaaaaaccgccatacactagcctatgacaaaggatggagagtgagaactgattctaagcaatatcaagtgctgaaacagaacccattctgctggacacatcacacgcatgatgcgaagctttggaatctaaaaaactacacaactgatgttattc

SEQ ID NO: 1011 - DNA, 391 bp, Lilium asiatic
cgcgtgcggaaaagcaccaacgaattatatttcacatccttaggtgatcttttaccacgtacagtgcaaaggccgtgcgcctggggctatgtcatttccccagagaataatgatcgtattcccacgactgacaaagctctcattacaggatggccggaaacttctaagcagtggacttcagcttcaaatggaactgttactcactctaaattgcataaatctgctcgacctcaaactcaaattatgacttgacttatgaccttcgtcatggccctttttactatggtctgttcagtcgagaatcatatgattaagaagctcccaaacaaaacatttggtaatgatcactagcatcctgcatttgcccaagacattatctctcaagaggaat

SEQ ID NO: 1012 - DNA, 316 bp, Lilium asiatic
  modified_base (30)..(33): a, c, g, t, unknown, or other
  modified_base (228)..(228): a, c, g, t, unknown, or other
  modified_base (251)..(251): a, c, g, t, unknown, or other
ctttttttttttatttttttatttttcccnnnnttttttttttaatttttatttgaccctggtttttttctttttttactaattttttattctttttttttcactttttaacatttttctatttcatccctttttttttcttaaaaacacccccccccccaagaaattttaaaactttaacattaaaaaaatatttatcttaaaaaaaataaaactaatatcaacccntacccttatttctatttttttgnaatccatactaatacaaaaaacaaaaactctctttgtataaaaaaaactgcacaaactacatttt

SEQ ID NO: 1013 - DNA, 297 bp, Lilium asiatic
  modified_base (7)..(7): a, c, g, t, unknown, or other
  modified_base (10)..(10): a, c, g, t, unknown, or other
  modified_base (16)..(16): a, c, g, t, unknown, or other
  modified_base (25)..(25): a, c, g, t, unknown, or other
  modified_base (29)..(32): a, c, g, t, unknown, or other
  modified_base (38)..(38): a, c, g, t, unknown, or other
  modified_base (47)..(47): a, c, g, t, unknown, or other
  modified_base (67)..(67): a, c, g, t, unknown, or other
  modified_base (77)..(77): a, c, g, t, unknown, or other
  modified_base (79)..(79): a, c, g, t, unknown, or other
  modified_base (81)..(81): a, c, g, t, unknown, or other
  modified_base (105)..(105): a, c, g, t, unknown, or other
  modified_base (115)..(115): a, c, g, t, unknown, or other
  modified_base (118)..(119): a, c, g, t, unknown, or other
  modified_base (121)..(121): a, c, g, t, unknown, or other
  modified_base (129)..(130): a, c, g, t, unknown, or other
  modified_base (135)..(135): a, c, g, t, unknown, or other
  modified_base (141)..(141): a, c, g, t, unknown, or other
  modified_base (143)..(143): a, c, g, t, unknown, or other
  modified_base (148)..(148): a, c, g, t, unknown, or other
  modified_base (156)..(156): a, c, g, t, unknown, or other
  modified_base (162)..(162): a, c, g, t, unknown, or other
  modified_base (165)..(166): a, c, g, t, unknown, or other
  modified_base (172)..(172): a, c, g, t, unknown, or other
  modified_base (181)..(181): a, c, g, t, unknown, or other
  modified_base (214)..(214): a, c, g, t, unknown, or other
  modified_base (218)..(220): a, c, g, t, unknown, or other
  modified_base (227)..(227): a, c, g, t, unknown, or other
  modified_base (229)..(230): a, c, g, t, unknown, or other
  modified_base (249)..(250): a, c, g, t, unknown, or other
  modified_base (292)..(292): a, c, g, t, unknown, or other
cacaagncgnaacacnccacaaggngaannnnaacccncaggccgcncgccggagccgccggaaaanggcgggacgncncncgccggcgcaggcgccggcaccgnggacgacgcnccnncncgacgccnnggcanccaacncncaccncaagcacncaaccnacnnccaacncgcaacaancagccgcaacgggcggccccccaaccgcaccgncgcnnncagaggncnngaagagagcagcgataggnnccagaacaacacagaacggcggagcagcaagaaagaagaacngacac

SEQ ID NO: 1014 - DNA, 372 bp, Lilium asiatic
gaaaacgcgttcgaccgcaccatactcccttttatttaaattttttataacatgattttgattatcttcttttggtgcccattcgacatattccatctatacttgcctttcccacttcttcaagcctttccaacaatcataactttcaatattattttgtacagctctctctttatctctcagttccacatctctgcacacactaacacatctcttttgcttaatacctcatcttcatctgcatcttccatgacatctaaaaccatcttattcataagactatcatgcatatgctcaacatactcttgcttattacctacatcctgtacactattctcatggtcaatgatatcataatctgtgcccctcgca

SEQ ID NO: 1015 - DNA, 334 bp, Lilium asiatic
  modified_base (93)..(93): a, c, g, t, unknown, or other
acggccttttgtggccttctttgtgggactgttgttggccttcttggatctgggggtgggttcgtcctttttccacttcttcttgagcttgantgcataccgcaggtggcaagtgcaacagcaacattcgtgatgatgttctcctcctccctctctgtggtggagttttactttctgcacagattccccctgccttttgctggctacctcatcttcatttccatattggctggattctggggccagtgtttggttaggaagatcgtgcatgtgctcaagagagcatcgcttattgtcttcatcctctcctctgttatcttcgtcagtgctctta

SEQ ID NO: 1016 - DNA, 306 bp, Lilium asiatic
cctcctgtctcacttccctcattcctcgtccgtctctgcggtccctcctctgtctctttttacctaactagctagctatccttcctgtagcgcggcaaatattgctgcctccaccacagccgcggcggcgctgctgctgctcctcctgtccctcgccgcggcggcggacatgtccatcgtgtcctaccgggagcccatcgaccaagaagcccggcggatttactcccaatggatggcggcgcacagcccgacctacaacaccttctgctaggaggaacggccgtaccaagtgttcccggacaacct

SEQ ID NO: 1017 - DNA, 380 bp, Lilium asiatic
caaacataatgttcagcctgtacattaaaccttctattgatggcgaagaaatagggaccaaagttggaggatttgctatgattgatccttcacatctcaaagaaatacctacagaaattgaatgagtgattcaaagcggagcaacaacaactgcagctatcagatataagaactgcgtaggacactattgccaaggccagatcggacctgacccacaaatcgctgtaatttctttgtatagctgcaaatagaacacgcgtactggaattcatgccaaattatgtgccacagaatgctgaaactgcaattttctgctgaatgagaattgtaaattaacctttagggtggatatacaaggaatgtaaatgttactatcatca

SEQ ID NO: 1018 - DNA, 273 bp, Lilium asiatic
  modified_base (36)..(36): a, c, g, t, unknown, or other
  modified_base (38)..(38): a, c, g, t, unknown, or other
  modified_base (255)..(255): a, c, g, t, unknown, or other
gtcattcccgtactccactgcatctagctgtttgancnaggcagacagaagtcgtaaactggctatgcggaaacaaggctgatgttggagctgctgcactggacgacatgggatcaatccatcttgcttgacagaaaggccacttcgaagtagttcgtatcctactctcttctggagcatccgtcaaagccgtcaacaggaagggtgtcactgctgtgcactatgctgcccaaggatcgcattgtgaactgatcncgtatttggtaagaaaag

SEQ ID NO: 1019 - DNA, 191 bp, Lilium asiatic
  modified_base (37)..(38): a, c, g, t, unknown, or other
  modified_base (110)..(111): a, c, g, t, unknown, or other
  modified_base (115)..(115): a, c, g, t, unknown, or other
  modified_base (122)..(122): a, c, g, t, unknown, or other
  modified_base (131)..(131): a, c, g, t, unknown, or other
  modified_base (145)..(145): a, c, g, t, unknown, or other
  modified_base (155)..(155): a, c, g, t, unknown, or other
gagaaagggagcccgagagaaagagaggagagtgaannacccgccgagccgcggcggcgcaccgggagcgcccagcaacacgaggcccgcacgcaggcgggcgaaccccnnggancgggcancgacgcccnaagagggcaaagangggaggccgnacaaaccgcggccgagaaaggcagaggagaagaaca

SEQ ID NO: 1020 - DNA, 377 bp, Lilium asiatic
ctgcaaagtataaaatagactctgttgaatttgaaacacttactctgggttccctaccaccgacttttcaagggatgaaagtgtatgttacagatgagcaggagttgataatggaaccatcactaaaatgggctggaaatcctaatgtcgttgttgttgtcaaggcatatgggttaaaagcatcagtacaggtaatagatttgcaagtctttgctgcaccacgtattaccctaaagccacttgtccctagttttccctgtttcgcaaatattcttgtctctcttatggaccagccacatgttgactttgcttgagcttctagaacagatgtatggcaatcctgtcttataattgtcagaacatcagactagtgtaca

SEQ ID NO: 1021 - DNA, 326 bp, Lilium asiatic
  modified_base (6)..(6): a, c, g, t, unknown, or other
ccgggncgaaacacgcggtgcgagcgaagcgaacaaacttttgtagacttctctgtgggactgatgttggccttcttggaatctgggggaaaattcaggcttggtccacttcttcttgagctaaagtgcataccctatgtgggaaccacaacaacaacattcgtcatgatactctactcctctctttttgtggcggagaattactttctgcacacattccctttacattttgctgactacaaaaacctcattttcatataactggattctgtggacaaaatttccttatgaagatcgtgcatatactcaaaagagcatcgcttatt

SEQ ID NO: 1022 - DNA, 361 bp, Lilium asiatic
  modified_base (16)..(16): a, c, g, t, unknown, or other
  modified_base (31)..(31): a, c, g, t, unknown, or other
gcgtacgaatgaacangtcaaagatcctaangagccattctcctctacagatacccgggattataatagagacctttttttgcgtcaagggtccttaatcattcaaaccatatatcatggtgccgtggaagctcttccgtcaagcttaaccttgcggaagaaattcttggagatactaaacagtgttgacttggcacattctgatgagttaaaactggaggtcctggatgaccttaaaagagatttctctcatagcgaggactactgggattggtttgctaggcttcagcttatcaacttgaacagttccagtaattcgaataaaaaggattctatattaaacaaattgaacacatcaatt

SEQ ID NO: 1023 - DNA, 466 bp, Lilium asiatic
gcgtccgagaccgcgctcagttgctataacaccgcctcgtcgtaccgacaaatctttgctagtatagcatctgtctagacgacgatgcgctgattatggcccatccatgcgcggtcttgcgcaagataaaagactgtcacatcttatatcctctgaggttgcagttttctgtattttcaagctacattttatgttgatcaaccattatttgtttcctgttcgactgttattttttgtctgcatattctgtctttcctttggtttatccttttttgcaggacagtccgaagtaagatctcacatccggtgcttcaaatgggtttattggtctgatgccattatgatctccattaaagggttttgaaaattaggccgaaaaagcttgcgggtgaactgaaatttggtggtgagaggactagaaacagaaattgtgtttcaatacgaccgggcaaacggctcccctttt

SEQ ID NO: 1024 - DNA, 97 bp, Lilium asiatic
  modified_base (8)..(8): a, c, g, t, unknown, or other
  modified_base (11)..(11): a, c, g, t, unknown, or other
  modified_base (14)..(14): a, c, g, t, unknown, or other
  modified_base (22)..(22): a, c, g, t, unknown, or other
  modified_base (26)..(27): a, c, g, t, unknown, or other
  modified_base (35)..(35): a, c, g, t, unknown, or other
  modified_base (49)..(49): a, c, g, t, unknown, or other
  modified_base (52)..(52): a, c, g, t, unknown, or other
  modified_base (71)..(71): a, c, g, t, unknown, or other
  modified_base (84)..(84): a, c, g, t, unknown, or other
aggcgaanaanganagaagcanggannacacaccnccggacacaggagnaancggcaccccgcaagccccngggggagaccagnccccccccccccc

SEQ ID NO: 1025 - DNA, 293 bp, Lilium asiatic
  modified_base (30)..(31): a, c, g, t, unknown, or other
  modified_base (228)..(228): a, c, g, t, unknown, or other
  modified_base (252)..(252): a, c, g, t, unknown, or other
cggacgcctgggccgacgcctgattatttnnataattcatgggttcaagagtcaggtgcaggggggctggtgcaaaaagtatccatttatcttcattaatttacctgggatatccacttaaaggcattaatggcgcacatcgtgatgagattttgttgcaacccaacgttcctacaatgttcgttcaaggaagcaaaaataatttgtgtcccctggataaactggaanctactttttttatttatttttttntttttttaactgtatgttatccaaggtggttaacactcctt

SEQ ID NO: 1026 - DNA, 450 bp, Lilium asiatic
  modified_base (396)..(396): a, c, g, t, unknown, or other
cggacgcgtgggcggacgcgtgggtggcgggcaaatccatgggttcaagagtcagttgcatggtggctggtgcagaaggtatccatgtatcggcattaatttgcctgggatatccacttaagggcatgaatggcgcagtgcgtgatgagattttgttgcaactcagcgttcctacaatgttcgttcagggtagcaaagataatttgtgtcccctggataagctggaaactacccaaaagaaaatggaatgtcccaatgaactgtatgtgatcgagggtggtgatcactccttcaagattggaaagaagttcctagagtcgacaggtataaaccaggcagaagctgagaagagggcagttgaggcgatctcagagttcgtcaccaaaacgctagcanggaagtaaccccctcgggttaatcatgtctgtatgatatatgtatgtctgaaaa

SEQ ID NO: 1027 - DNA, 351 bp, Lilium asiatic
  modified_base (29)..(31): a, c, g, t, unknown, or other
  modified_base (250)..(251): a, c, g, t, unknown, or other
cggacgcgtgggcggacgcgtggtttttnnncttatacaatgatacaagatgcaggatcagggtggcataatcctggcgtctccatgtataaacaccaatctgccaacaatacaccccactacacacaaaaacagcaatacttgatatgatgtgttggaggcgtaattacaaatacataaaacattcacgggtgcatataaaattttgaaaaacagtatgagagaaaaaacactttttatattactaggnntcccaaggaacataatgttatcaatgttttggagcaaaacacaaaaattggaaaaatatttcgagcatctataagtataaaacatacttgagctcaaaaa

SEQ ID NO: 1028 - DNA, 137 bp, Lilium asiatic
aatttcttatcattcacaccatatatcattctgccttttaaactcttacaccaaacataacctttctaaataaatccttctatatactaaacatctctcacttcacacatttttatcaaacaaaactttaacttctt

SEQ ID NO: 1029 - DNA, 281 bp, Lilium asiatic
  modified_base (88)..(88): a, c, g, t, unknown, or other
cggacgcgtgggtggattttggatcctgaaaagtggggaggagccattgggctctctattggatccgaatactacgggcgtgaaatcncagcatatgacattcagaccactcgctgtgatctctatggtcaggttagtgatctttcttccccctaactacttatgccaaatttgttaacttacttatcagctttgcaccccttgacacaggagaagaattacagtgaaagggccatgctcatttatgatggtttgcattatgatgctctcgctatgtcttc

SEQ ID NO: 1030 - DNA, 366 bp, Lilium asiatic
  modified_base (43)..(45): a, c, g, t, unknown, or other
  modified_base (94)..(94): a, c, g, t, unknown, or other
  modified_base (262)..(262): a, c, g, t, unknown, or other
ccacgcgccgggattgtatattagatcgaagttatggagtgtnnnaccaaaccttattgaagagaatatggtgcggactttccaatactctagnttatataatctagtgggctgaaatagtaaacacgatgcgctatctcattaattactctacattatcaactattgtatctaagaaaccttcggaggcatggtctgggacttctaattaatttaaacttaagatatttgaatgccctagatatttttatatgagaggagnaaaatattatgataagaatctgaaagcctatatttcttgcgtctttcgagataatgaagggatataagctatgggtcttggatcgtcagaagatattgatcaac

SEQ ID NO: 1031 - DNA, 444 bp, Lilium asiatic
  modified_base (29)..(30): a, c, g, t, unknown, or other
  modified_base (227)..(227): a, c, g, t, unknown, or other
  modified_base (249)..(249): a, c, g, t, unknown, or other
ctgttagggcacttgagatatacaggagnncatgtcaacaggcagagagactatcacagttgtatgaaatatgtaaaagcattgatatcggacggggagagaaatttataaagattgaacagccccctgcatcttttctcacagcattagaggagtatgtcaaagatgctccacgagcttcgattgttcgtaaagatcaggcgattgatgataaaccaaaagtagtnttggcgatagaatataaagaanctccagaagttgaagaggtaccaaagccaccctctccgccacccgaaccagtcaaagaggaagcccctgcgcctattgttgagcaacctgatttactggggttaaacgataccaacccagatgcatccgagctagatcacagaaatgcattggcactggccattgttccagttgatactcaatcagctaccgttg

SEQ ID NO: 1032 - DNA, 332 bp, Lilium asiatic
aaaaaacaagatattcactctaaggacccattctcagatagcaatccccgggataatatgagagacctataatttcactgagcaattctaaccattcacaccattctttttgaaaccaaagaaactcttccctcaaacttaacctttccgaagaaattcttggatatactaaacaaaagatgacttcgctcattatgatcaaatataacttgcacgtccttgatgaccttaagatatatttttttgatacctaaaaccaacttacattccttcgctaaacaacagcttaacaactaaaacacttccattacccaaaataaaaaccttgctat

SEQ ID NO: 1033 - DNA, 386 bp, Lilium asiatic
cgggcgaccacgcgtccgggaccgtgggcgaagaggcagactatcagcgctgagatgttctaaggcagttgaggaggtgagttccgggagttcatcgagccccttcgagcttctttggaggaattcaggcaaaagaatgcagagaagaagtctgaggcaaaggcgaaagaatcaggtaagaaaagaaaattggaggagactcctcttgagaccgccgacgaagctgctcttgaagaagaagaaattgataatggaggcgatgctgaggacggtgatggtgctactggcaatgagtaatacatgaatggtgatgattagtagtaaactgtatcaggatgtttagacttgtgataacatcttggaagcacatccttggatgcattttc

SEQ ID NO: 1034 - DNA, 163 bp, Lilium asiatic
  modified_base (2)..(2): a, c, g, t, unknown, or other
  modified_base (18)..(18): a, c, g, t, unknown, or other
  modified_base (30)..(30): a, c, g, t, unknown, or other
  modified_base (36)..(38): a, c, g, t, unknown, or other
  modified_base (43)..(43): a, c, g, t, unknown, or other
  modified_base (46)..(46): a, c, g, t, unknown, or other
  modified_base (49)..(49): a, c, g, t, unknown, or other
  modified_base (57)..(57): a, c, g, t, unknown, or other
  modified_base (71)..(72): a, c, g, t, unknown, or other
  modified_base (75)..(76): a, c, g, t, unknown, or other
  modified_base (82)..(82): a, c, g, t, unknown, or other
  modified_base (89)..(89): a, c, g, t, unknown, or other
  modified_base (97)..(97): a, c, g, t, unknown, or other
  modified_base (108)..(109): a, c, g, t, unknown, or other
  modified_base (111)..(111): a, c, g, t, unknown, or other
  modified_base (121)..(121): a, c, g, t, unknown, or other
  modified_base (125)..(125): a, c, g, t, unknown, or other
  modified_base (130)..(130): a, c, g, t, unknown, or other
  modified_base (134)..(134): a, c, g, t, unknown, or other
  modified_base (140)..(140): a, c, g, t, unknown, or other
  modified_base (143)..(143): a, c, g, t, unknown, or other
  modified_base (150)..(150): a, c, g, t, unknown, or other
gnaagggggaggcacccncggcagaggggncggccnnnaccancancgnggaggccngcagggaacgggcnnccnncaaganaagggcngaggcggngaagaacggcnnanaaagcgccgncacnggaancacngggcgncancaaaccngagaagccacggc

SEQ ID NO: 1035 - DNA, 208 bp, Lilium asiatic
  modified_base (140)..(140): a, c, g, t, unknown, or other
  modified_base (179)..(179): a, c, g, t, unknown, or other
acaacggggaggcacacccgacagagggggcggccacgaccaacagccgggaagccggcaggcaagggccgaccgacacgacaccggcaggggcggcgaaacaccgcccagaacgcgccgacaccggacacacggcggcnagcaagccggagaagccacaaccgcgaaaccgggacaancgacaagagacccgcgaagcgccgaacaa

SEQ ID NO: 1036 - DNA, 224 bp, Lilium asiatic
  modified_base (8)..(8): a, c, g, t, unknown, or other
  modified_base (20)..(20): a, c, g, t, unknown, or other
ccccgggncgaccacgcgtncggcagagcgaccaccgagatgagcgtcgattttagcagcagttcttgcgcctgaggcaagggggaatttattgggtgctgttcttactgacttgagactatcgactattaaattcacaccacttaatggaggctctattgtcagaatggtgatcatttttgcacctcactcttattagcaactttgttaacttacttattatg

SEQ ID NO: 1037 - DNA, 450 bp, Lilium asiatic
gacccacgcgtacgcaaagccggcctccattccccgtcgggaggatcgggcgatacctgaagaaaggccgatatgctcaacgtgtgggctctggagctcctgtctaccttgctgccgtccttgagtaccttgctgctgaggttcttgaattggctggtaatgcagctcgggacaacaagaagaaccggattgtacctcggcatgtgtgcctggcggtgagaaatgatgaggagcttggaagactgttgggtggtgttactattgctcacggtggagtcctccccaacatcaaccctgttctgctgccaaagaaaaccggcaaggaagggactgagcccaagtccccaaagaaagccactaaatcgcccaaaaaggcttaaattgtgtgttgtgactgggccaatgtatgtatctaattccctagggtgtctggttaatttcggaagaagt

SEQ ID NO: 1038 - DNA, 364 bp, Lilium asiatic
  modified_base (27)..(27): a, c, g, t, unknown, or other
cggacgaaaagccggacttcaatttcncataaaaaggatcgggcgatacctgaagaaaggccgatatgctcaacgtgggggctctggagctcatgtctaccttgctgccgtccttgagtaccttgctgctgatgatcttgaattggctggtaatgcagctcgggacaacaagaagaaccggattgtacctctacatgtgtgcctggcggtgagaaatgatgaagagcttggaagactgttgggtggtgttactattgctcacggtggagttcttcccaacaacaacccttttctgctggcgaagaaaaccggcaaggaagggactgagcccaagtccccaaaaaaagccactaaattggccaaa

SEQ ID NO: 1039 - DNA, 452 bp, Lilium asiatic
acgcaaagccggactgcacttccccgtcgggaggatcgggcgatacctgaagaaaggccgatatgctcaacgtgtgggctctggagctcctgtctaccttgctgccgaccttgagtaccttgctgctgaggttcttgaattggctggtaatgcagctcgggacaacaagaagaaccggattgtacctcggcatgtgtgcctggcggtgagaaatgatgaggagcttggaagactgttgggtggtgttactattgctcacggtggagtcctccccaacatcaaccctgttctgctgccaaagaagaccggcaaggaagggactgagcccaagtccccaaagaaagccactaaatcggccaaaaaggcttaaatttgttggtgtgacttggccaatgtatgtatctaattccctcaggtttctggttaatttcggaagaagttaagattatgtt

SEQ ID NO: 1040 - DNA, 299 bp, Lilium asiatic
aattctacattagccatcggaaaaaacttccttatcgaccatttaatctatagagcaacatggggtatatcttgaaatagacagctctgactaaagattttcacacaactgacatcagatatcgcggtgtgatcttgtacattctctcaatctaacgatcgatgttttgccaagttaaagaacttttatacaacgcctatattagtttgcctgcgcaagagcttaaaatgaagggacacgggatcataccttggccaagcactggatacttcttcgctagccgactttgtttttataat

SEQ ID NO: 1041 - DNA, 224 bp, Lilium asiatic
  modified_base (10)..(10): a, c, g, t, unknown, or other
gaacacgcgncggatagacataaaaaggtttgtagagctaatgtttagaatatatatgtcctaggatccaacggggataagcagggggaagaggcaggaacttatcataccctaatacaacatgtataacgagcctaactcatgtcggttgaacaaaaaacttacttgagagtctgacacttttaagaatatatggatttgttgtgtactaagttctactaata

SEQ ID NO: 1042 - DNA, 442 bp, Lilium asiatic
gagcgacccaaatccgtgaccatagcaaacgactacacgcctgacttgcaacattcaacaggggtgaagaaggtggtcgcgcctataacgcataaacccgaaagatccgtggcatgacgggcaaagttaacggccctaatgagacacccatgtttaaaccccgttctctaccaaccgtatacccagtggtggaacaccgaccaaaccaaacctttaattacattgacgacagtgctttactgtcggcgattcttgaagagaaggagcagtagcccattaagcaatacaatcttctgaatctgcaccctgctgacaagtctttcatgccatatggaggagcgaggatgagtttccattctgatcaaggaagtaactatttggactattcgaactttggctgggaacacgacgtgaaagctgatgatatcacctcaattctttc

SEQ ID NO: 1043 - DNA, 382 bp, Lilium asiatic
ctttggaaaggaattgtacctgggctgcatcgtcaatgcatttatggagggctaaggattgggtcgtatgatccggtaaaatccttcttagttggggatagcttcattggagaggttcctttatctatgaaaatacttgctgggcttacaacaggtgctctagcaatctcagtggcaaatccaaccgacctcgtgaaagtgcgactgcaggctgaagggaagcttgcaccaagtgtgccaagacgttactcatgagcagagaatgcttattttacaatattcagacaggaaagacttattgctctgtggactggtattgatcccaatattgcccgtaatgcgattataaatgctgctgaattgccagctatgatcaagtgaa

SEQ ID NO: 1044 - DNA, 441 bp, Lilium asiatic
  modified_base (3)..(4): a, c, g, t, unknown, or other
ctnnggaaaggaattgtacctgggctgcatcgtcaatgcatttatggagggctaaggattgggttgtatgatccggtaaaatccttcttagttggggatagcttcattggagaggttcctttatctatgaaaatacttgctgggcttacaacaggtgctctagcaatctcagtggcaaatccaaccgacctcgtgaaagtgcgacttcaggctgaagggaagcttccaccaagtgtgccaagacgttactcacgagcagagaatgcttattttacaatattcagacaggaaggacttattgctctttggactggtattggtcccaatattgcccgtaatgcgattataaatgctgctgaattggccagctatgatcaagtgaaacagacaattatgaaacttcctgggttttcagataatgtttttactcatattttggct

SEQ ID NO: 1045 - DNA, 359 bp, Lilium asiatic
cggacgcgtgggcggacgcgtggggtcctcgttcgtaacaatactaaggaggtgattagagggaacctcagcgtgacttgcagagacatagcaggggagaactgtattgatggagatagtgcgactgtcctttgggctggtgttcttagtggaatccatttggaggttccacccttgcaagtggtatcacattcttttgccctctactttctcgtgccaggggagtacagtctgctatcgggtgctgtcatagatgatgcaaccgatgttctccgagctcgtgcaagaactagctcgcccgatgagccaatattttgccgtggctcttccttccatgtgcatgtagttggcactacata

SEQ ID NO: 1046 - DNA, 442 bp, Lilium asiatic
cgccagcacggaatcgcacctgggctgagctatcaacacaacatatgaagggcataagatcggggtgcactacgcaagatccatccttttcaaggcatgacatctacagcgacatcttgattgtttacataccactacctggacagctaccaacaccgacggcatgaataacacttgctcttcgacaacgacggcagaactcctatctgccggcaatattcaactacttcgtctgcatgcaagccacgaagcctccagcagaatccagcgaatcctcgaaggccgtacgatcttgacagatgctaactaaggtcagatctcaatacaattggtactgatgctatatttacttttgcagattatttgaagctataaaagagatccatctcaccgcagagaaaatatacaaggctggaagcccgggagggttccaatggaatct

SEQ ID NO: 1047 - DNA, 300 bp, Lilium asiatic
  modified_base (15)..(15): a, c, g, t, unknown, or other
  modified_base (32)..(32): a, c, g, t, unknown, or other
ccggcaaacccgggncgacccacgcgaccggntctggtgagattccatattctttgatcaattacacactttatattgaagaccaggagggggagtgtttggttgtgaaagcaatcacttctaaacttctggactgtaagatggatcacatgaaccagattgtaattgtgagccgacacatggagcgcgtgtttgggatgtctcaatggcaaggtttccgttcaaagctggtggtttggatgtgtaacattggaagtgcgattactactattaaagcgaacaaattattcgatgaatgct

SEQ ID NO: 1048 - DNA, 287 bp, Lilium asiatic
  modified_base (7)..(7): a, c, g, t, unknown, or other
  modified_base (19)..(19): a, c, g, t, unknown, or other
  modified_base (31)..(31): a, c, g, t, unknown, or other
ccggggncgaaagacgcgnacgaggacgcgnacatgatactattaatcttccaattgcactccattttcacgccacgaataatgagggccacgggggaggatagacccaactatacaaacggctcacatttatgactgtaaggggatctcttcacgaagttttgctctaccaaccgaaacagcctctcgtgctcttctaatcggtcgtatcagggaattcaatgcccacactgtctgtactccctgacgcctgcactctactgtataaatattaaccatctatgtga

SEQ ID NO: 1049 - DNA, 402 bp, Lilium asiatic
  modified_base (9)..(9): a, c, g, t, unknown, or other
gggacgcgngggcattgaacaagcaggtggctttatctccaatggaggtgaaaagaatgtgggagctgattgttcagctaatatgactcttaatacggagtcttctcttgatactcatctaatgcatgcggaaaccgatgttttaaagaaagatttgcctgaaccagatggggatgaggttcttgtacatcttgaagccaaacaaagaactttacggaaggcggatgttatagcagatgatgatactcatcggcttggagaccatgaactgatggagagttccgagaaccaaaatccggagcatgcacccgtggttccttggaccctgtactcgaaaagcaaccagcgagcatgttacaacttaccgcctcaagatgaaacacagttctctgtcactgatct

SEQ ID NO: 1050 - DNA, 283 bp, Lilium asiatic
acggagcatctgtccggctatccgccgacattcggttccagatcctccacaaagactgctggaacccagatggagctactagctgcctctcttgagcaccatacgaacgatccgggtgaacctgtcgatgatgactaggatgacgatgatgacgatgactgaaaagatgacgacaaacatgaggatgatgcacatggaggtgatggcaaaggaaagtcaaagcagagcacaagtgagaagaatagatgaaaggcaatggttaaacttggaatgaaacccatac

SEQ ID NO: 1051 - DNA, 274 bp, Lilium asiatic
agggaacatatctccggctatcttcagatcttcggttccagatccgccacaatgactgctggggcccagaaggagctacttgctgactctcttgagcaccataacatcgatccgggtgaacctgtcgatgaacactcggatgacactgatgaggattactaaaaatacgtccacaaacatgaggatgatgcacaatgaggtgatggcagtggttggtcaaagcacagctcaagttagtggaataaatgtaaggttttgttgaaacctggaatga

SEQ ID NO: 1052 - DNA, 138 bp, Lilium asiatic
ggcaaaacaagatatatatatatatatatatttttacatatatatacatatatacatatatagatatatctggggctacatatatacatcaaaaccatcattcacccaccgacattcttccattgataaactataccc

SEQ ID NO: 1053 - DNA, 56 bp, Lilium asiatic
ccatggactcctcgaccctggcatctgtcgaacacctgctactagccatcttcaaa

SEQ ID NO: 1054 - DNA, 334 bp, Lilium asiatic
tcggtgtttcgttgatagcgaacatgaccgtgacggcgaatccgaagaagcacaccgctaaggggatcgccgtcaaagtcgacgcggtaacgacaaaccgcgtcggatagctatgctgtgcaagcggaccgcatcggcctcgacaagggcggccactccaatctgtattgccccctctgcaaagttaccgctcccgatatcaagtcgatgcagatccaccacgactcccgccatccaaagatccctttcgatttagcgaagctgaataacctccactcctacaccaccgtcgttggcgacacctccaagccccgaccgggggttcgtgggtccc

SEQ ID NO: 1055 - DNA, 431 bp, Lilium asiatic
ggcggcggctgtgaacggtacagcggtggatctgaaggcggcgtttcgggaggtgtactcggagctcaaatcggagctcctcgaggatcccgccttcgactacaccgaggattcgcgatcgtggatcgagcagatgctggactacaatgtacccggagggaagttgaaccgagggatctccgtgattgatagctacaagttgttgaaagaagtaaatgaactcagcaacgatgatatttttcttgcaagtgcacttggttggtgtattgaatggcttcaagcatatttccttgtcctcgatgatatcatggacaactctcacacaaggcgaggtcagctttgttggttcagactacccaaggttggccttattgcggcaaacgatggcattttactccgtaatcacattccgcggattctgaaacgacatt

SEQ ID NO: 1056 - DNA, 417 bp, Lilium asiatic
gcgctgatatccctccttccctcatcactgaatgtcattggaagctatctgcacctacagcctggcatggctttcctataccgcagtcgcgtgtcgagatagaacagtgcatatattggcgattgcgcatctcaatcaggagagtaaaataaaaatgaatgatgtatttagcatgtgtaatgcactgcggtctcgttgcaatgttgatgatttggaaatgacgataacatgaaacctcgttaaaattagagatattactggaaaggtttgtatgcaagaactctggtagagaaatagccttaaaatcatgtcacggtgtggttctaaaggttcgccaatcaatatcatcccgatgataatatgtgtgtgggcagcaaacagttggaggatgtcgtgcacttgatggatttattaacc

SEQ ID NO: 1057 - DNA, 257 bp, Lilium asiatic
gcaacggtctggcagtaacatgcctgcagtttaggaagggctgacgatggactatcatccacgagagctggattgaggcatcatcagattgtggaagagctgcacctgaggatggtgagtggtctggtagcgtagtacttatggaggatggtgagtgggcgacagactatggatcggaggtagcatatgctgggactagcattgctcggtcggatgtacatcggatacaggagtaccggctgtttcccttatggaag

SEQ ID NO: 1058 - DNA, 283 bp, Lilium asiatic
tcctctctatgtttttcttatcatgcactttcctattcttccattaattttggctttttctaaagccattttcctcatgcctattattcatcactcttatacaatccataaaattatttctcctttctctctctatcctaaatacacacacttcacctttatctattatcttcctccacatcttttaccttaatatcatacttatcttttattaatatatgacgtttttttacatttaattttcccaaaatgatttttttctctttactttttcttattaatc

SEQ ID NO: 1059 - DNA, 155 bp, Lilium asiatic
cggaattcggtgaccagctcgatggcaggtgggcattacgctgatagatgggaccagggatagggtttgtgagttatctattgtgcgtcaatggtctttgatgatgcgatggcaacatgtgttatagtcatttaggagctgataactgtaattat

SEQ ID NO: 1060 - DNA, 366 bp, Lilium asiatic
cccacgcgttcgtccactcgtccgcccacgcgtccggttacaacttaggagagatgaaatcggggaatctattggtagcgcattattggccaaggtggtagatctgctcactgaccttgatgtaaacataagttgggaagccattctacaagaagagcataacaaaggcgtctttgacatggatcttgaagatgctgaggagaatgcggacggctttggtttaaaggactccgaagatactggagttttcaaggataatgcttttgctgacaagttggatggtttgatggtgatcatctgcgaacatctcaaatcttgtgcttttgatggctgtttgggaaaagtatttgaaacacttctggaatc

SEQ ID NO: 1061 - DNA, 388 bp, Lilium asiatic
agattgatcaattgggttcatatgttaacagaagggagcttgttgatattgttggcattgttcagaatgtgtcatccacactcagtgttcgcagaaagatagacaatgaaaccattcccaagcgtgatatcaccattgctgatgacacgaacaaaactgttaccatctctctctggaatgatcttgctaccaatgtgggtcaggagctactagacatggctgaaacctcacctgttgttgcattgaaaggactcaaagtaggggatttccaaggtgtatctctatcaaccataagcaaaagcactgtgctcataaatcctgatctccctgagtcaaagaagctcaagtcttggtatgaatctgaaggcaagggcacctcaatgtcaat

SEQ ID NO: 1062 - DNA, 419 bp, Lilium asiatic
gaagataatgatcctctcgatgtgttggttatcatgcaggagcctattctcccaggaagttgccttcgggctagggccattggcctcatgcctatgattgatcagggggagaaagacgataaaattattgctgtttgcgctgacgatcctgaatacagacacttcactgatatcaaggagcttccgccacatcgtttagctgaaatcagacgtttctttgaagattataagaagaatgaaaacaaggaagttgcggtgaatgatttcctgcctgccactgatgcttatgaagctgttcaacactctatggatctctatgcttcttacattgtggagaatctgcgaaggtgagcgagctcggatgtcaggactatggaactgtggcgagctcggatgtcaggactatggaactgggatga

SEQ ID NO: 1063 - DNA, 210 bp, Lilium asiatic
  modified_base (55)..(55): a, c, g, t, unknown, or other
tcgtactcttttttttccaagtttcgttaacattttgtatatcttcaaataaaantcttagagaaatgattaatccgtgaaatcttcacagaaatttatccaatcattactaatactaattcttaaattactctatattcacccaattttacttcatcaaattttttatacttaattaaaattctatcatatataactcttatattattc

SEQ ID NO: 1064 - DNA, 410 bp, Lilium asiatic
gcgggggtcatgatatcagcaactgatctttcacaacataccctagaacagattgaacccgttcgtaatttctttgccgctctttttcttgctagcatcggaatgctcattcacgtccattttcttatggaatcatgtggatattttactagcagctgtgatattagtaattatcacaaagacagcagtgatcactgttgttgttaagttttttggctacacaaacaagacgtcacttcttgttggcatgtcccttgctcagataggggagtttgcttttgttcttcttagccgggcttcaaatcttcatcttgttgagggtaaattataccggctacttcttggaacaactgctctaagtcttgtgaccactccacttcttttcaagttgatccctgcagtcattcatt

SEQ ID NO: 1065 - DNA, 363 bp, Lilium asiatic
cccacgcgtccgtccactcgtccgtccacgcgtccggttacaacttgggagagatgaaatgggggaatctattggtagcgcattattggccaaggtggtagatctgctcactgaccttgatgtaaacataagttgggaagccattctacaagaagagcataacaaaggcgtctttgacatggatcttgaagatgctgaggagaatgcggacggctttggtttaaaggactccgaagatactggagttttcaaggataatgcttttgctgacaagttggatggtttgatggtgatcatctgcgaacaatctaaatcttgtgcttttgatgggctgttgggaaaaagttttgaaacactttttgg

SEQ ID NO: 1066 - DNA, 334 bp, Lilium asiatic
tcttactaaataatctgatactttattacctgcaccatatcattgtcatttagtgtgcgttattcaaaggatgcattaatagcatccccttcatttttcaattttcactaatattattaatccaaacacttaatatgctatatattttataaatgtcaaacatatattcaatttcgttgttagcctatgatacaatatctttcctacctatatataaaaattatatcattttcgaatcttatataacttaatatcaatatcatattccttttcccccaataatttattcaatcattacaattattacagtataatataatctcttttttacata

SEQ ID NO: 1067 - DNA, 160 bp, Lilium asiatic
ttcttctccatttccatatccacaaccgcaacctgcatctttgccatggcggatgtttcgagtaccgttatcccggattcagttcttaataatcggaatatggatgatcaattgtcgctctctaataatgaggcgcttgtggagaataaaaataatgatc

SEQ ID NO: 1068 - DNA, 169 bp, Lilium asiatic
tcgccacgcgtccgcaacgaatgagggacttaagcttgatgagagcgaggatgagaagaagaagaaggaagcccttgaagagaagtttgagggtctgtgcaaggtcatcaaggaggtgcttggtgataaggttgagaaggttgtggttttttgatccgtttgttgatat

SEQ ID NO: 1069 - DNA, 418 bp, Lilium asiatic
cgctctgatcccgtagaccgtgagaaaacttgccctcttttgcttcgggttttcaccaagactggtggccaccagtcggacgaagaatttgctacgagaggaaaggagcccaaagatgaagtccagatatatacatggaaggatgctacacttcgagaactaactgacctggtcaaagaggttgctcttgcagcgaggaaaagagatgcgaagctgtcatttgcatttgtgtatcctgacaagcgtggtcgttatgtcgtgaggccggttggcatggcattttcgtatggaaataaatcgcgattggatgatgcatagacattacaagatctcaactttcagggtggagattacttgagtgttgctatcatttagagggattagctgcgataccggtgggaagctggactgatgtttc

SEQ ID NO: 1070 - DNA, 215 bp, Lilium asiatic
agacggattcaatcgccatctacctccgatccctcgccgacgcctacctcctactctgaggtgccttcaacgcgtagtccatgtccgactcctcctcacttaaataccatgccacttctgaccaacacccacttccccatgaaagcctgcccaaaggccaccctcccaaaccccttaagagatactccctcagcacccacggctaattcgagatc

SEQ ID NO: 1071 - DNA, 297 bp, Lilium asiatic
gtaccgtggagatgtagtgcccaatgatgtgaacgctgcggtggccacaattaaaaccaaagggaccgtccaatgtgttgactggtgccctactggtttcaagtgtggcatcaattaccagcctccaactgtggtccctggaggtgatttggcgagggtgcatcgtgcggtcttcattatcagcaacaacacagctgtggctgaggtattctcacgaatcgaccacaagtttgatctgatgtactcgaagcgtgcttttgtgcattggtattttggcgagggcatggaagaagggga

SEQ ID NO: 1072 - DNA, 385 bp, Lilium asiatic
cggacgcgtggggccagggccttacacggctgtttctgtgacaccagctccggatgatcacgactctacaactgctgcgggcacgcaatctggacaaataccaagaacttttagtccaagactcattgcactagttgaccatttcaagatggccctcgactgtttctttgctgtgtggtttgttgttggaaatgtgtgggtttttggtggtcattcctcagctgccgaagctcctaatatgtacaggttatgtatagtgttccttacattcagttgtgttggatatgctatgccattcattctgtgtggaatgatctgctgctgcctaccatgcataatttcgattatgggccttagagaggattctggccagaacagaagagct

SEQ ID NO: 1073 - DNA, 366 bp, Lilium asiatic
cggacgcgtggggccagggccttacacggctgtttctgtgacaccagctccggatgatcacaactctacaactgctgcgggcacgcaatctggacaaataccaagaacttttagtccaagactcattgcactagttgaccatttcaagatggccctcgactgtttctttgctgtgtggtttgttgttggaaatgtgtgggtttttggtggtcattcctcagctgccgaagctcctaatatgtacaggttatgtatagtgttccttacattcagttgtgttggatatgctatgccattcattctgtgtggaatgatctgctgctgcctaccatgcataatttcgattatgggccttagagaggattc

SEQ ID NO: 1074 - DNA, 407 bp, Lilium asiatic
atggcgtcggatcagactgcgaggggcgaggatttcgagaagaaggcggagaagaagctgagcggatggggtctcttcggatccaagtacgaggacgccgccgatctctacgacaaggccgccaattgtttcaagctcgccaagaactgggagagagcggcagctgtttacattaaactggctggaattcatatcaagctggagagcaagcatgaggcggcttcggcttatattgatgcggctaattgttacaagaagtactcaaactcagatgccgcacgagccctaaatgaagctgtaaatctttttctggagattggcagactaaatatggctgcgaggtactgcaaggaacttggtgactcatatgaggctgaacaggacctcgagaaggctatggactactt

SEQ ID NO: 1075 - DNA, 403 bp, Lilium asiatic
gttttatctggaaaaggtggggttggaaagagtacattctcagcacaactctcgttcgctctcgctgaaaaggagtaccaggtcggccttctcgacattgacatatgcgggcctagcattcctaagatgttgggccttgagggtcaagatatccaccagagcaatctcggctggtctccgatctacattgaatccaaccttggagtcatgtccatcggattcatgctccctaatcccgacgatgctgtcatatggaggggccctcgcaagaacggtctgatcaagcagttcttgaaagatgtgcactggggggaggtggactatcttgtggtggatgctccgcctgggacatctgatgagcatatctcgatcgtccagtatcttcaagcgacgggaatagatg

SEQ ID NO: 1076 - DNA, 150 bp, Lilium asiatic
  modified_base (5)..(5): a, c, g, t, unknown, or other
  modified_base (8)..(9): a, c, g, t, unknown, or other
  modified_base (77)..(77): a, c, g, t, unknown, or other
  modified_base (87)..(87): a, c, g, t, unknown, or other
  modified_base (94)..(94): a, c, g, t, unknown, or other
  modified_base (98)..(98): a, c, g, t, unknown, or other
  modified_base (110)..(110): a, c, g, t, unknown, or other
  modified_base (116)..(116): a, c, g, t, unknown, or other
  modified_base (121)..(121): a, c, g, t, unknown, or other
  modified_base (131)..(131): a, c, g, t, unknown, or other
  modified_base (148)..(148): a, c, g, t, unknown, or other
ggcgnggnnggggaccgttccaaaagagggtttaccaacgcaacggcgacgcaccaccaggggaggggccaaacaanaacgaggcgncaacagngagnaagcaacccccnggaccncgcangcccgaaggnacaaaggaaaccgcaanac

SEQ ID NO: 1077 - DNA, 401 bp, Lilium asiatic
caagcttgcttcaatggcgatctacctccgatccctcgccgccgccgtcctcctcctcggggttgccgccgacggcgagtccatgtccgactcctccgcactggaatccgttgccacgtcggtccacgacgtcctcccccagtacggcctccccaagggcctccttcccaactccgtgaagagttactccctcagcggcaacggcgagttcgagatcgaactctcagccccctgctacgtccagttctccgatctcgtctactatgagcgccacatcaaagggaagctctcttatggctcgatctccgacctgtccggcataaaggctaagaagctcttcgtctgggtgccgattacgggcatcgtcgcacatccggcagactccaccgccgttttcgagg

SEQ ID NO: 1078 - DNA, 369 bp, Lilium asiatic
atcagacttcgaggggcgaggatttcgagaagaaggcgaggaataatctcagcggatggggtctcttcacatccaattaccattactcctcccatctctactacaaggccgccaattgtttcaagctcgccaagaactggtagagagcggcagctgtttacattaaactggctggaattcatatcaagctggagagcaagcatgaggcggcttctgcttatattgatgcggctaattgttacaagaagtactcaaactcatatgccgcacgagccctaaatgaagctgtaaatctttttctggagattggcaaactaaatatggctgcgaggtactgcaaggaacttggtgactcatattatgctgaac

SEQ ID NO: 1079 - DNA, 378 bp, Lilium asiatic
gcttgctgacaaatcattgctggcatcctctgggtttcagggtgatataaaatctttgcagaaaaacttggcagctaatcacctgatctatcatcatcaacataacaaacaaatgagctgccccgccatgggccagcttctctcaaataccctatattacaagcgtttcttcccgtactatgctttcaatgtgctaggcggccttgacagtgaagggaaaggatgtgtgttcacatatgatgctgtcggttcttatgaaagggttgggtacagtgcccaaggttcatgctcgacgctcatcatgcccgtcctggataaccaactgaaatctccgagtcctctgttgttgcctactatagatgccgtgactcctctttc

SEQ ID NO: 1080 - DNA, 301 bp, Lilium asiatic
  modified_base (44)..(44): a, c, g, t, unknown, or other
tttttactgaggatccttatactcctataaatcactatactaanaattttaaactcctatactatcccttcaacataaattttaattactcaattcttccacatacatttttaatatccaaccttttccaattcataatttttaatattcattatttttattataattcacttcattttttttatatattttataccctctcttatattttttattatatttaatttttaacccctttcaactttatctattctttttctataattatctttattataaaaattttttttcacattcatta

SEQ ID NO: 1081 - DNA, 393 bp, Lilium asiatic
tgcatttcctgatgttatttccttaagttctaaacacgagctgaaatatggattgatgacgtgtttttagtttgagtttttataagacccaacactgcttgtagctcagctacttggttcttctattgtagatccatgagtagtagtttgttggggacactgcatcctaccaggagatttcttcatcatctatgttttaagttcatgctcttgcacaaattgaacctgatttattttgcgagagtgaaatgtggttctggactcaaactgaacctgatttattatgcgagagtgaaatgtggttccaaataagtgttacgggagatggtttttattggtaatgactaaaattgaaaatggacgttcccctttttgccaaaggggatattgata

SEQ ID NO: 1082 - DNA, 341 bp, Lilium asiatic
ggcggctgatggggttttcaacgtcgttgttgagattccgaaggagtcgagggcgaagatggagattgcgactggggagccgtatacgccgataaagcatgatacgaataaaggggaagctccgatactacccgtacaacataaattggaattacggaatgcttccacagacgtgggaagatccaacctctgccaatgcagaagttgaaggggcattaggggataatgatccagttgatgttgttgagataagtgagacccgggctaaaattggtgagatattgaaaggtaagccccttgcagctttaaccattcctgatgaaggggaaccggatttgaaa

SEQ ID NO: 1083 - DNA, 367 bp, Lilium asiatic
gaccggggcgtccgggcggctgatggggttttcaacgtcgttgtttatattccgaaggagtcgagggcgaagatggagattgcgactggggagccgtatacgccgataaagcatgatacgaataatgggaagctccgatactacccgtacaacataaattggaattacggaatgcttccacagacgtgggaagatccaacctctgccaatgcagaagttgaaggggcattaggggataatgatccagttgatgttgttgagataggtgagacccgtgctaagattggtgagatattgaaggtcaagcccctggcatgctttagctatgcttgatgagggggagcttgattggaaaattgttgccatt

SEQ ID NO: 1084 - DNA, 406 bp, Lilium asiatic
tgttaaaccttcctcccgtaactggacaggttactggggatgtcccagtgcctgatggctgtagttcaagtcacactgcaaatggaggtattgaagctaataaaggtagccagccaaatacagattaccctgcccagtatcaaatcagagaacttcatcgtaggatggtcgacttcattaaaaaacgatatcttctgctggagaaagctctcaatgcggaatattgtttagcacaaatcggttatactagaccgcttgagtccggaaaacaagatccagaggccgaccaagacaacactgaaatgccattgagtatttcattgatgaagggattacctgtcctggagcccatcactgcagaagaagtgtgtatgataacaaaccggtctgcctcgagatgacacga

SEQ ID NO: 1085 - DNA, 356 bp, Lilium asiatic
tgttaaaccttcctcccgtaactggacaggttactggggatgtcccagtgcctgatggctctagttcaagtcacacgtgcaaatggaggtattgaagctaataaaggtagccagccaaatacagattaccctgcccagtatcaaatcagagaacttcatcgtaggatggtcgacttcattaaaaaacgatatcttctgctggagaaagctctcaatgcggaatattgtttagcacaaatcggttatactagaccgcttgagtccggaaaacaagatccagaggccgaccaagacaacactgaaatgccattgagtatttcattgatgaagggattacctgtcctggagcccatcac

SEQ ID NO: 1086 - DNA, 211 bp, Lilium asiatic
  modified_base (51)..(51): a, c, g, t, unknown, or other
  modified_base (54)..(54): a, c, g, t, unknown, or other
cccgcacgagacccaaacaagcgcattttccactccctacggctccgccgncgncctctttttggaaatgggtgcctggcgcggcggcgccgcctccttctccatcatcggcctcgcatccaaacccacccaccttttcttcaaaccctggtttaaatgcgagtacctttcccacccccctcaaaatttaagacacttaacaataatttac

SEQ ID NO: 1087 - DNA, 362 bp, Lilium asiatic
gttggagctagtgggtcagggaagagttctataattgcactgattgagaggttctacgatgcgactgccggcaaggtgatgatcgatggtaaggacattcgtaggctaaacttgaagtcacttaggttgagaattggtttagttcagcaagagcctgtacttttcgcctctagcatctttgagaacattgcttatggaaaagatggggcaactgaggaggaggtggttgaggcggcgaaggctgcaaatgtgcacggttttgttagcgggttaccggaggggtacaagacggcggtgggggagaggggagtgcagctttcatgcgggcagaagcagcggattgcgattgcgagagcagtgct

SEQ ID NO: 1088 - DNA, 360 bp, Lilium asiatic
acaacccggacttcagcaaccgttcctgtaccgcaggagaagttaggttggataatgcgacgacaggcttggcagccatatgtatgcaatataacggtggtctctggaaacgacatatgcacgactgtgggtcgtgttactccgaatatcttcggccagatgaaagcagctgtcagtgtgagttttgcccttaaccattacggtcccttcctggttcagctccaggactgcaccttcgtgcgacagacattctcttcgataagcgacaacaactgccccgacctgaagaaatatagcaagtgggtgtatgtagggctggcaatggtatcgactgcggttatgctgtccttgatattctgg

SEQ ID NO: 1089 - DNA, 375 bp, Lilium asiatic
cctctttccctctccaaattcctctgatggcgcccaagtccgagaagaagcccgcggagaagaagccggtggcggagaagcctgcggaggaggagaagaaagcggccccagccgagaagaagccggcggagaagaagcccaaggccgggaagaaggtcccggcggcatccaaggagggggagaagaagaagaagaggtcgaagaagtcggtggagacctacaagatctacatcttcaaggtgctgaagcaggtccaccccgacatcgggatctccagcaaggccatggggatcatgaacagcttcatcaacgacctcttcgagaagatggcacaagagtccgcccgccttgcccgcttcaacaagaagaacacca

SEQ ID NO: 1090 - DNA, 292 bp, Lilium asiatic
cactcacctttaactcttctcctaagtccttcatcattagtatctccgcggctgcagaatgtccctcaaacaagaaagaggcgagaggagaatgccatttcttcccttccaacgtgtattctatacgccacaaccaaattcgagcactcgatcaagatcagctgttagagttacaatgctttccatctcaatgccaaatagttccatgattgtgtttggaagaacttctttcattccaggttgacattcttgcatatgaataatggaaaatagattgtaccaacaatttctt

SEQ ID NO: 1091 - DNA, 385 bp, Lilium asiatic
gaccacgcgtccggtcactcaccgtgaactcggcgccgaggtccttcatcattagtatctccgtggctgcagaatgacccccaaacaggagagaggcgagaggagaatgccatggtttccctgccaacgtgtattctatacgccgcaaccaaattcgagcactcgatcaagatcagctgggagagttacaatgctggccatctcaatgccaaagagttccatgattgtgtttggaagaacttcttccattccaggttgacattcttgcatatgaataaaggaaaagagatggaaccaacaatatctggccatatgggaaatgttcttggtagaaagctgccaatttcataaccaaagcaagtttttgttggaaatgttgttttgt

SEQ ID NO: 1092 - DNA, 406 bp, Lilium asiatic
gagagaacaaagaagattcaggatggatgtgaagatgaacttgaaggaaatgacatcctaggctcggttgcaagacagcccaatctattaagagaccaaatcctcgacacaatactgagcatgctctttgctgggcacgaaacatcctctgcggccatcgccctagctatctacttcctcgattcctgccccaaagctctccaacaattgcgggaagagcaatctgaaatagcgaagttgaagaaagcacgaggggagacaggattgatctgggatgactacaaaaaaatggagttcacccattgtgtgataaatgaaaccctaaggctgggcaacatcgtcaaattcttgcacaggaaggccattaaagatgttcaatataatgggtatgacattccatgtgggt

SEQ ID NO: 1093 - DNA, 324 bp, Lilium asiatic
tcattttttgactgaccaccgccatcattaatccgtctctttgcctcgcatgggaccttgtggaccaaaactgactgtgagattgatattttgtggcacggaaacaggtgatgagataagtgaagagtggttttatcaccataataattgactgcttctgggtgctactatttttttaaagaaaatgatgaaaaatggacattctttttctgttatacaacaattattggtacatatgttaccggtgattatggatcccaaggtcttcaaatgggtgcaatttcattggaggcacactcatttagcacaagaaatttgattttg

SEQ ID NO: 1094 - DNA, 411 bp, Lilium asiatic
aaagtacgaagaaataagagagacaattttgcagcagccctttgtgtgtgatcgagctagggattggcgccctgatataacctgtgatgatcccccagatatctctcaggatggtagtagactctgggctatcgataagcccaacattgctcaaacgcctcctgggtgggaaagggtgctcaagatcagaggtgaaggaagcaccaaattcgcagatgtgtattatgttgcaccatccggaaagagattccgttcaactatcgaggtcgaaaagtacctatttgaaaatccagagtacattagacaaggggtaactttatctcagttttctttccaaaccccaaggcctttgcaagagaattatttaagaaagcgtcctccacgtgtgatgaatggaaatgcgggtgctgg

SEQ ID NO: 1095 - DNA, 430 bp, Lilium asiatic
ccactcttccaattcttatttttgtatttcaaaatcctcatttatatacctcatacagaatacttttcatagactcctacatctattaataatctctacttcctcactcatcaattaaacctaccacttatatcccatctcaataaaattctttacccctattttccattaatttcttatattactactattctaatatattttacatattcaaacaatatcttttactactttctaataaattattttcaccctttacaatttcttttatcatttacttaaccacctttatcttcctcttttttaaaacactcttaaatttaaccatcttctctctttcttatttttttccatattcatttcattaaattctatttccactctcctttctatctcattctatctatctttcctctctttatctttcctt

SEQ ID NO: 1096 - DNA, 394 bp, Lilium asiatic
gagagaacaaataagattcatgatggatgtgaagatgaacttgaaggggatgacatcctaagctcggttgcaagacagcccaatctattaagagaccaaatcctctacacaatacttagcatgctctttgctgggcacgaaacatcctctgcggccatcgccctagctatctactttctcgattcctgccccaaagctctccaacaattgcgggaagagcaatctgaaatagcgaagttgaagaaagcacgatgggagacaagatttatcttggatgactacaaaaaaatggagttcacccattgtgtgataaatgaaaccctaatgcttggcaacatcgtcaaattcttgcacatgaaggccattaaaaatgttcaatataaatggtattaca

SEQ ID NO: 1097 - DNA, 318 bp, Lilium asiatic
ttagagaacaaataagattcaggatggatgtgaagatgaacttgaaggaaatgacatcctatgctcggttgcaagacagcccaatctattaagagaccaaatcctcgacacaatactgagcatgctctttgctgggcacgaaacatcctctgcggccatcgccctagctatctacttcctcgattcctgccccaaagctctccaacaattgcgggaagagcaatctgaaatagccaagttgaagaaagcacgatgtgagacaggattgatcttggaagactacaaaaaaatggagttcacccattgtgtgataaatga

SEQ ID NO: 1098 - DNA, 134 bp, Lilium asiatic
  modified_base (47)..(47): a, c, g, t, unknown, or other
gcatggatggggtggtgataatacaatcctacacatcttgaaatggncgaaggagaggatggggagatacccaaagcagctaatagtggagctgtgcctccgttctggatgggagcttgcctattaatagcctt

SEQ ID NO: 1099 - DNA, 410 bp, Lilium asiatic
gatcttttggtcggcgtggttgtcaatgtggctttagtgggaatgttggcaccgtatgcacgcattgggaagccggctactgcgaatggattttttggacgcattgcaggtgcttatggtagtctgccaagcagtgtttttgaagctgaaagaccgggatgcacatatcaagttcagcaacgtattggaacatacttttttaagggatttctatatggatttgttgggtttgcatgtggtcttgtagggcaaggcattgcaaatgcgatcatgaccgtgaaaaggaacgtaaagaaatcagaagaagacgtaccagttccacctctagtgaaaagtgcagctctttggggtgtctttctcgcagtttcatctaacacgcgctatcagataatcaatggtttggaacgctt

SEQ ID NO: 1100 - DNA, 412 bp, Lilium asiatic
gaccaccaccaccactgcgatcgagcgatgtcgggtcgaggcaagggaggtaagggtttggggaagggcggcgcaaagcgccaccgcaaggtcctcagggacaacatccagggcatcaccaagccggccatccgccgcctcgctcgccgcggtggcgtgaagaggatcagcggcctcatctacgaggagacccgcggggtgctcaagatctttcttgagaacgtcatccgtgatgcagtgacctacaccgagcacgcccgccggaagacggtgacggcgatggatgtggtgtatgcgctcaagaggcaggggcgaactctgtatggtttcggcggctgaagagacgaggttcgttctagggtcgggttatctgtgtggctttagtagttgttgatgttacctgttgtgtctt

SEQ ID NO: 1101 - DNA, 131 bp, Lilium asiatic
tcaaatgaacagggccctttttatagatcttcttataatgacacttaacaataacaccttttttagctttatatcataccaacaatgggattttaagtaaaaaaaaatccttaagaatggaaatttctttt

SEQ ID NO: 1102 - DNA, 376 bp, Lilium asiatic
  modified_base (13)..(13): a, c, g, t, unknown, or other
  modified_base (18)..(18): a, c, g, t, unknown, or other
  modified_base (35)..(35): a, c, g, t, unknown, or other
  modified_base (79)..(79): a, c, g, t, unknown, or other
  modified_base (83)..(83): a, c, g, t, unknown, or other
ccgagtcttttgngaagngaagggataacatctcnatgaacagggcccttttatagatgttctagatgacgctgaacanaacnccttttgagcttgatatcagacgaacaagggatttgaagaaaaaagatgctggaggatgggaattgtctttttcgtgctgttgctgatcaagtttatggtgatcctgatgcatatgatatggttaggcaaatgtgcattgattatatggaaagggagagagatcatttttttaatttattacttaaaagcttacaatttacttgtaaaaaggaaacggagtaacaaggtacccaaattcattttgcatgattcttttaatattttggggctttattgaccaatttctgtaccc

SEQ ID NO: 1103 - DNA, 390 bp, Lilium asiatic
tggaactagctcgatctggatctggtcttcttcccctcatttttgccgatcagggtaaggtggtaaatttttgatactaatactgactttcctcttgcagaaattgagatcatgtgaagtgctcgtgctacatccataccaatgctataaaaagacctcaagagcaatgaagaaaagcacgatggaggctcggttggatccctgggtagagttctagtgttagagagtcattcttgtagaactctgatcgggaaggaatctctgattcgttccttctcagaggagcaaaagcgatagggaagaatttgagtgagaaatttgtgagtgcatgaaatatgtgagatggagagatttgtttagatgtttcggatttttgctttcatgctttct

SEQ ID NO: 1104 - DNA, 434 bp, Lilium asiatic
cgcgtccgatggagagctgtaactagccttgccaaagcccaagaggtgtcatcagtaccattacctattggttcggtattgttggctcaaacagaggccatcttacgttcaagaggcaagtgggagagacatctacgcctggagtggctctcctggccagcaggaaccagacctgctgaattgtacttccaaatgcatttgcttctacggcaggcagctggattgcccgaccggcatgctatgatagaaccaacacgaagctcggagaaatggctccttcgagcaatacatttgaacccctcatgtttgaggtactggaaggttctgcagaagattactgtatcatgatagatgtccctgcatcagtttaacatgtgcctctagtctcagatctaatactgaattatactagcttcagctcatcttggttccga

SEQ ID NO: 1105 - DNA, 412 bp, Lilium asiatic
gagagctgatctagccttgccaaagcccaagaggtgtcatcagtaccattacctattgtttcggtattgttgggtcaaacggaggccagcttaggttcaagaggcaagtgggagagacatctacgcctggagtggctctcctggccagcaggaaccagacctgctgaattgtacttccaaatgcatttgcttctacggcaggcagctggattgcccgaccggcatgctatgatagaaccaacacgaagctcggagaaatggctccttcgagcaatacatttgaacccctcatgtttgaggtactggaaggttctgcagaagattactgtatcatgatagatgtccctgcatcagcttaacatgtgcctctagtctcagatctaatactgaattatactagcttcagctcatc

SEQ ID NO: 1106 - DNA, 312 bp, Lilium asiatic
ctcgggccacttcgccgaggtcttttggtgaaggtgaagggtataacagctcagatgaacatggcccttgttatggatcttcctatgatgacgctgaacaagaacgcctttttgagcttgatatcagacgaacaaggggatttgaagtaaaaaagatgctggaggatgggaattgtctttttcgtgctgttgctgatcaagtttatggtgatcctgaggcatatgatatggttaggcaaatgtgcattgattatatggaaagggaaagagatcatttttctcaatttataaactaaggctttacatcttact

SEQ ID NO: 1107 - DNA, 449 bp, Lilium asiatic
cggacgcgtggggatgatttctgcgagggagtttgcggaggatcagattgcggagaagatatcgctgcagaagggggtctccatgaatgccgctcacaacatacttgttgcaggggctgagaaggatgatgatatcatcttctgaatctgaatgatcaggtgcaggctgcaggttttctgtagagcgctgaactatggacgtaagttacttgcttgttgtgagacttccaagtaagcggccattcataagtttttttttatgaatatttaaagattatgcatagctttgaaaggccaattaagatttattgcaataattatccaacaaactctctttccaagtagatagcattctagagttggatattggacatgatcctgttttgtcaaccacgaagttgcccctggagatattatcatttaccatgttgtctggtaaattagttggc

SEQ ID NO: 1108 - DNA, 434 bp, Lilium asiatic
aagaggcaaaaattactgatatctatgattagcaatataacaacagggaattagattgcatatagtctcgtgtgcttgcattcacattatgtgcgcgtgcattctggcctgatgatggccagcctaccagctgctccaatttgcgttgctccgactttttcgcttcattttcaggattgctctgctccgtctagtgatgagtgtacctccaagtgctgctctgggactctgccgatccatcctctgttgggtctccatcctcttatgtgactgcactgccccatcctctgatgactggtcctcccggaccgtgcgatgactgattggctgcatctcatctcatggctctccaagaagttgcatagttcaatggaggagagaagtcggattggatcactctagacccaacagattttaccttaggaaaatgacca

SEQ ID NO: 1109 - DNA, 450 bp, Lilium asiatic
cggacgcgtggggatgatttctgcgagggagtttgcggaggatcagattgcggagaagatatcgctgcagaaggggggctccatgaatgccgctcacaacatacttgttgcaggggctgagaaggatgatgatatcatcttctgaatctgaatgatcaggtgcaggctgcaggttttctgtagagcgctgaactatggacgtaagttacttgcttgttgtgagacttccaagtaagcggccattcataagtttttttttatgaatatttaaagattatgcatagcttcgaaaggccaattaagatttattgtaataattatccaacaaactctctttccaagtagatagcattctagagttggatattggacatgatcctgttttgtcaaccacgaagttgcccctggagatattatcatttaccatgttgtctgttaattagttggcta

SEQ ID NO: 1110 - DNA, 290 bp, Lilium asiatic
tcggacgcgtggggattatttcttccagggaatttgcggatgatcagatttctgaaaatatatcgctgcgagaagggagtctccatgtatacctctcacatcatactttttgcaacttctgttaatgattactatatcatctttagtaatctaatgatcaagttcaagcctgcagttttatcgtagatcgctcatctatttacgtaccttactttcttgttttaagacttccaagtaagcctccattcataagtttctttttatgaatatttaaagattatgcaaagctt

SEQ ID NO: 1111 - DNA, 393 bp, Lilium asiatic
  modified_base (7)..(8): a, c, g, t, unknown, or other
gaattannggtcggactcatttgtatgatttattctatttaattatctcattgatcaatattatatacaatatatcactgcagatccatgtattcatctatccccatacctacatacttttctcataaactaaaaaatatcatcattccatatcttaaatatcaattaccagcttcaatctttctgtttagcgctgatctcttaactatagacacttgctacttgcttgacattcaacttaacagtcatccatcagtcattatctatcaataatcaataattatacattattcttacatgccaacttacaattattatataaattattcatcatactatgttctccctttttaagcatattataattttatattgtacattatacattatttt

SEQ ID NO: 1112 - DNA, 448 bp, Lilium asiatic
caaagccggcctccagttccccgtcgggaggatcgggcgatacctgaagaaaggccgatatgctcagcgtgtcggctctggagctcctgtctaccttgctgccgtccttgagtaccttgctgctgaggttcttgaattggctggtaatgcagctcgggacaacaagaagaaccggattgtacctcggcatgtgtgcctggcggtgagaaatgatgaggagcttggaagactgttgggtggtgttactattgctcacggtggagtcctccccaacatcaaccctgttctgctgccaaagaagaccggcaaggaggggactgagcccaagtccccaaagaaggccactaaatcgcccaaaaaggcttaaatttgttgttgtgacttgtccaatgtatgtatctaattccctaggttttctgtttaatttcggaagaagttaagaatatgt

SEQ ID NO: 1113 - DNA, 458 bp, Lilium asiatic
cggacgcgtggggatgatttctgcgagggagtttgcggaggatcagattgcggagaagatatcgctgcagaaggggagctccatgagtgccgttcacaacatacttgttgcatgggctgagaaggatgatgatatcatcttctgaatctgaatgatcaggtgcaggctgcaggttttctgtagagcgctgaactatggacgtaagttacttgcttgttgtgagacttccaagtaagcggccattcataagtttttttttatgaatatttaaagattatgcatagctttgaaaggccaattaagatttattgtaataattatccaacaaactctctttccaagtagatagcattctagagttggatattggacatgatcctgttttgtcaaccacgaacttgcccctggagatattatcatttaccatgttgtctgttaaattagttggctattgattt

SEQ ID NO: 1114 - DNA, 412 bp, Lilium asiatic
cacgcgtccgtttaccttttcgaaccaatcaatcttctgttcctgctttttctaccattcttacttcgagcacttaggatttttgactggggctctagtcttctacattacatctcatcgagaaagatggctctacagaacataggtgctgcacatagcgatgatgccttctacaggtacaagatgcctctaatcatcaccaaaatagaaacgaccggcaatggaatcaagaccaatgttgtcaatatggcagatattgccaaggcattatccatacctgcctcctacaccacaaagttcttcggatgtgaacttggtgcgcagtccaaatttgatgaaaagactggcgtgtcactagtttatggggctcatgatacttcaaaacttgcgggattactggacatgttcatca

SEQ ID NO: 1115 - DNA, 433 bp, Lilium asiatic
acgctccaagtataaaaaatttggaaggttatgttatgtaatcagggctctgagagccttgatgggtcacagtaaccgagacctaaaaatcaagatcgatggacgagagtgggaagtattttataaggcgactgccctttgcataggaaacggcaaattctttggtggtggcatgaagataaccccaacagctgatccttccagtggatactttgaagcaattattcttcaggatttcaaatggtatagactttgttcttaaactacataagctgtataacggaatgcatctattaaagagaaatgtatgctcaaagagtggacgatccatagaaagtgaggagctaacgagtagcggtgacgtctacttacaggctgatggggagcacttgggattcctttcaacaaaatgcaccattttaccggctgcaat

SEQ ID NO: 1116 - DNA, 421 bp, Lilium asiatic
ttacccttatcaccgcaaaagcttcatttggtacttctatctactctcttgtcccggttatgtgggattttgattgagatgtgtaggattttggaaaatcttggatttgtgtggcaaaatgaggaaaggatctaagctcattaaggaaaagagatgttgctcgcttgatgaggatgtgctctcgcatctataagttcccctccacccccattggatcgaagtaagaggtctcactccggcccaagtgttggagggcacattgtttgccgtctttttctcggctttttatgatgcacatttggagagcatctacaagtgatctcggagtggagagttcatcatcgtctttttttgtgagtctttgtcgaacttttagagagtcatttaacgtggagtttttaaggttttagacttattttat

SEQ ID NO: 1117 - DNA, 257 bp, Lilium asiatic
  modified_base (18)..(18): a, c, g, t, unknown, or other
  modified_base (38)..(38): a, c, g, t, unknown, or other
  modified_base (87)..(87): a, c, g, t, unknown, or other
ggcaggcaccgacgaatncattcccgcataatacaacncaccgaccaactcgctcctccttgtcatggtcttcgacactgccagccnattgctcacacccgaagcctatcccatcttcccggcaacagaagtcacgataagaatctgcacctactcgctcgatcaccacatgtgcatcaaccccgaattcaaaaacatcaaggaacacagggccgcgtgtgtcttggaaaactacgctcaaggagcataatacaaag

SEQ ID NO: 1118 - DNA, 193 bp, Lilium asiatic
  modified_base (18)..(18): a, c, g, t, unknown, or other
ggcaggcgccgacggatncacttccgcataatttaactcaccgacgaactgggtcctactcgccatggtcttcgacaatatcaacccataactcacaccctaagcctatcccatctttttttcttcaaaaggcacgataagaatctgcaccttctcgctcgatcaccacatgtacatcaaccccgaattcaaa

SEQ ID NO: 1119 - DNA, 425 bp, Lilium asiatic
gtgatcacgagactattcccactaaggtcacaaggcagcaatgttctgttgaggggcagagttctattgcttctaagacattaagtccgaaagaactgaataaacatacttcttcagccggaaagaaaatgggaagctcacggttgacagggagtcgtgaaaagatgattcgaaccgcagaaaagcttgagaagatgaatcgaaatgccgggaagcgtgtgaaggggaatccaactgccgagaagcatgagaaggtgaatcgaaccacagagaagcatgatgaggtgaatcaagatcatattgtagaggaggaagccttagatttctccggtgtacctgcaccggtgtgctcatgtactggcgtgcctcgccaatgctatagatgggggtccggtgcatggcaatcatcgtgctgtaccacaagc

SEQ ID NO: 1120 - DNA, 436 bp, Lilium asiatic
gttttgactggagcgttgggaagggaattccattcaactatttcacctatggagcagcatttgctgaagttgaaatagacactctgacgggagattttcacacgaggacggcagatatcgttatggatcttggacattctcttaatccagcgattgatgttgggcagattgaaggagcttttatacaaggtctaggttgggttgcgttggaagagctaaaatggggggacgcagatcataagtggatcaggactggaaacttatacacttgcggacctggaacttataaaattccttctgttaatgatatccctctcaaattcaaggtttcactgctgaaggggataccgaatccaaaggcgatccattcctcaagggccgtgggcgagccaccattttttctggcttctgcggtattgttcgcgatcaaagatgc

SEQ ID NO: 1121 - DNA, 445 bp, Lilium asiatic
ccttcaccctccaacaccggcaaaagcttcatcaaggtacatctatctactctcttgtcccctttatgtcttatttggattgttatgtgtaggattttggaaaatcttggatttgtgtggcaaaatgaggaaaggatcaaagctcaagaaggaaaagagatgttgcaagcttgatgaggatgtgctctcggatctataagtacccctccacccccattggattgaagtaagaggtctcactccggcccgagtgggggagggcacattgttggccgtctttctctcggttttggaggatgcacattgggagagcatctacaagtgatctcggagtggagagttcatcatggttttttgttgtgagtctttgttgagctttaagagagtcatgtaagtggagtttttaaggttttagtcttattttatgatgagtttttggttcgga

SEQ ID NO: 1122 - DNA, 434 bp, Lilium asiatic
gtgatcacgagactattcccactaaggtcacatggcagcaatgttctgttgaggggcagagttctattgcttctaagacattaagtccgaaagaactgaatcaacatacttcttcagccggaaagaacatgggaagctcacggctgacagggagtcgcgaaaagatgattcgaaccgcagaaaagcttgagaagatgaatcgaaatgccgggaagcgtgtgaaggggaatccaactgccgagaagcatgagaaggtgaatcgaaccacagagaagcatgatgaggtgaatcaagatcatattgtagaggaggaagccttagatttctccggtgtacctgcaccggtgtgctcatgtactggcgtgcctcgccaatgctatagatgggggtccggtgcatggcaatcatcgtgctgtaccacaagcttatctgca

SEQ ID NO: 1123 - DNA, 448 bp, Lilium asiatic
cgccgccgaggttttgcgccgctctcccccgcctcctccttcgaaggctaggcaaggatggtgagagtcagtgtcttgaacgatgctctcaagagcatgtacaatgctgagaagcggggaaagcgccaggtcatgattaggccttcatcgaaggtcataatcaagttcctcctggttatgcaaaagcatggatacattggggagttcgaatatgtggatgaccacagatctggtaagattgtggtggaacttaatggccgtctgaacaaatgtggggttatcagcccccgctttgatgttggtgtgaaggaaattgagccatggactgcaagattgctcccttcccgtcagtttggttacattgtgctgaccacatctgcggggatcatggaccatgaagaagctagaaggaaaaatgttggtgggaaagtactcggctttttctact

SEQ ID NO: 1124 - DNA, 368 bp, Lilium asiatic
actgtcgaggtgggcagtgaaagagggcatgtggaaaagattttcataaacaattatgttcgaactgatagatccaatggttttagggctcttattgtcatggaagatcattccttgatattggtacaacaaggcgagattgtctggagtcgtgaggatggacttgcttcgattatagattcaacatcatctgaactaccagttaagaaggatggtgtttcaattgcgaaagttgaacacaacctctttgaatggctgaaggggcacatactgaaacttaaaggaattctcatgcttgcaagccctgatgacttggctgctattcaaacaatgagaataagaaattctggggaaaacaagatgacaag

SEQ ID NO: 1125 - DNA, 116 bp, Lilium asiatic
ggcaggcgccgactaattcaattacggataaaacgaatcaccgaccatctcgcgcgcactggtcattggcttctacaatgttaacccctggctcacacactaagcctactccatct

SEQ ID NO: 1126 - DNA, 439 bp, Lilium asiatic
cgggacgacccactcctacgcaaccatacatttaacatctagtctaactcctccgctattgtcacagctagtcaaaccagcgacaacttgctgccttcttccagattctcataaccactatatatgaccaaaaactcctttagcgcctaatcacgcatatgccataataacaagacccaatgaattttctcctgcatatgcaaaatcatagatacatatcatgaactaaaaaatccggatcaccacatatctgataatatggtgctgtaacttattggccagatctactaatatttgatgatcaaccttcactttcatatcttatgcatagagatacagccataaacttctaaatttctcctttcccggcaatttgtttacactattctgtcctcattttccgacatcatggcccatgattaacctaaaaacataaata

SEQ ID NO: 1127 - DNA, 177 bp, Lilium asiatic
  modified_base (2)..(2): a, c, g, t, unknown, or other
  modified_base (10)..(10): a, c, g, t, unknown, or other
gncaaacacnagactaaacttctcagcaatttttccactacccaaaaccggtgtctacttggtgactatcaaagccacttacacaatctccataatccacctcaccttcccgtcaaatcttatcatctctttcctaaaatccatcaatatcacacatacttacttaaccaaaactat

SEQ ID NO: 1128 - DNA, 434 bp, Lilium asiatic
ctgaagtcaacccaacaccatctttacccctttctcatcacgtataatgggttcgaaagtatgctttcttctctttctactggtcataagctatacttgtgcagaggccagaactttggaggccatggatataatggctactatagacgaccataagcagccaagcaaagtctccgcaaaagaaattctcagggatgaaccattgtgcactttatgtgaagagtttacctaccaagccatatcttatcttattgaaaatgagacccaaactgagatcataaatgggcttcatgaaacatgctcgcaggtgcactcttttaaaaagaagtgtacttctgtggttgactactatgcacctcttttctttacccgaagtgctacaatactcccggagcagttatgttgaaaggtgaatctgcgtgagaaaatgtcac

SEQ ID NO: 1129 - DNA, 366 bp, Lilium asiatic
caggcatctgatcagattgcgacgtcatatgccgagctaagggatgctagtgcaaatgcaaagactggaggaggcacacttcccatcaccgcaagaactctagagactgttatccgtctatctacagctcatgctaaactcaagttgaggcctgaggttctgaaagaagatgttgatgctgctttgaatattctcaactttgcaatatatcataaagagttgacagaaatggatgagcgtgaagaaagggaaagagagatggagatgaaaaacaaagctgatcatgatgctggaaacactggtggaagtaatactgctgatgccatggatgtggatgaacctcctgcccctgaaatgatgaggttc

SEQ ID NO: 1130 - DNA, 382 bp, Lilium asiatic
cgcccacaaataacttttctgctttcactacttggttgtcggagaacatagctctgacagcgcatatatgatgcgtagctccagtatctacgaaccattatcggggatttccaacagtattggattcggagatgacgactgatagattcatatggttcattccactcgttacgagttcagcaacatttaactgtcccttctgcttcggtttccggcattgcgccttactgtgtccagacttgccgcaattgaaacatgaacctgtgaagcgcttgtcattcttgcctttatagacataattatgactggcattgaactccctcttcttatcaatgttcttggtagattaggactgcaccaggtgtgccgcggaatatccaac

SEQ ID NO: 1131 - DNA, 384 bp, Lilium asiatic
ggcaatggcgagtcttaactgaaagggaatctcaccatgctctcgaaggacagaatagcgtatttctacgacggggatgtgggcaatgtttattttggaccaaaccatccgatgaagccacatcgcctatgtatgacacaccatcttgtcctgtcatacgaacttcacaagaagatggagatatatcgaccacataaggcgtatccagtggagcttgcacagttccattcagcagattatgtcgagttcttgggacgagtcactcctgatacacaacattcatatttaaatgaattagccagatgtatggacgaaaagagataataatcttggtgaagactggcctgtgtttgagaatttgtttgagttctgtcagatttatgc

SEQ ID NO: 1132 - DNA, 267 bp, Lilium asiatic
ccaccagagatctaccatgtcggcgaactccgccgctagggccgaggctagggacgccaggtacatcttgcggccctgttccagcttctcataccgacgtgatcggacgcccaacgccttcggcgcctaccgacgcatgtgagatttcgcctcgagccggcgagctgtcctcgggatggggaatggcggggctgcgcatcggaactaagctcgccgaggcacaagcattgtggatcaatggtgctgtaacagattgggacgcgttac

SEQ ID NO: 1133 - DNA, 288 bp, Lilium asiatic
cgcgcatgcttcactacagagccgcaacgcactgatactaatatctaccattatgagctcgtgactagaactgatagtgggggagatacacctgctgaaacactgattactcgcatctttaaatatgaggcatatccattgcccatattgcatctttcctcgggacgagtgatgcttgctataattattactagttgcactgagacacgctgagcatcacgatcatattgcctatgtgcctatcacacaatgtgtcacaaatactagtgtctcgaatctttctagacc

SEQ ID NO: 1134 - DNA, 443 bp, Lilium asiatic
aattcatatatagatttttacacatgaaaaatagatcctacaacttttttccttgtattattctagtcaaatatttgctcaaagtttgagttcattagcatgtcgtagattaaacttttttggaattcttcgagtcgtattaaataataaaaaaccaaataacatgagaattacatattatagttttcacatctattttttacttatagaacttttttttaaaatttatttttaattatcaaaataaattttataaaataaaattcgactatttagtgctaactccccaatacttatgcaaatacaatgtccttgatgcaagtgaggcaggaaaaatagaaggtttgaaataatttgcaacaattaaatattatataatcaaaatttcaaacaaagattataacaaaaatattattattttctagagtgtgcagccacacact

SEQ ID NO: 1135 - DNA, 189 bp, Lilium asiatic
gccaatcgctagtctaaactgtctggtattttgtcaattacctccaatctcggggtagcgggggatcacctccgggatctgcgaaatgtctatctttaaccaaacctatcggttatctataaataccgctgtatgaaactgactctatacctgacattccctctccaatatatgcttgcaacattttga

SEQ ID NO: 1136 - DNA, 336 bp, Lilium asiatic
ggcaatggctagactaaactgaaagggaatcttaccatgctcttgaaggggtgaatatcggatttttacgacggggatgtggacaatgtatattttggaccaaaccatccgatgaagccacatcacctatgtatgacacaccatcttgtcctgtcatacgaacttcacaagaagatggagatatatcgaccacataatgcgtatacagtggagcttgcacagcatcattcagcagattatgtcgagtacttgggacgagtcactcctgatacacaatattcatatttaaatgaattagccagatgtatggaccaaaatagataataatcttggtga

SEQ ID NO: 1137 - DNA, 365 bp, Lilium asiatic
cctcaatcatcgtctctcgctctcagcaatggccggacgtggcaaggcggtcggctccgcagcggcgaagaaggcgacctcgaggagcagcaaggccggtctccagttcccggtcggccgtatcgcccgcttcctcaaggccggcaagtacgccgagagggtcggcgccggcgctccggtctatctcgccgccgtcctggagtatctcgcagccgaggttttggagttggctgggaatgcggcgagggataacaagaagactaggattgtaccgaggcatattcagcttgctgtgaggaatgatgaggagctttcgaacgtgcttgggatggtgactattgctaatggtggggtgatgccgaaca

SEQ ID NO: 1138 - DNA, 427 bp, Lilium asiatic
cggacgcgtgggtttttctcaaaatttgttatcttcctattgttggcagtgtttattccttattttgtggaataatgttttctgtagtcagattttggtaactatggttgcctgttatgctcattgtggtagcttttagatctgctacagtagtctttactgtttttgggagtctattttatctgtttatttaatcatttaataaagccagcttttgtatcttcaaattccttttcagatgcagatctacgttagatttttattggactgcttagtttgtcttcagagcttggcatctgtttgtgctcgacttgtagggtagatcttatctgttacgttaatacagagtttttatctgttgtattgtctgtccatttatctttcatttggcaagccctacgtcttttagtttttctttcttgtttac

SEQ ID NO: 1139 - DNA, 373 bp, Lilium asiatic
cggacgcgtgggtttttctcaaaatttggtatcttcctattgttggcaggggttattcctgggttttgtggaataatgttttctgtagtcagattttggtaactatggttgcctgttatgctcattgtggtagcttttagatctgctacagtagtctttacttgttttgggagtctattttatctgtttatttaatcatttaataaagccagcttttgtatcttcaaattccttttcagatgcagatctacgttagatttttattggactgcttagtttgtcttcaaaacttggcatctgtttgtgctcgacttgaggggagatcttatctgttacgttaatacagaggtttatgtgtggatttgctgccatt

SEQ ID NO: 1140 - DNA, 422 bp, Lilium asiatic
aattcatatatagatttttacacatgaaaaatagatcctacaacttttttccttgtattatgctagtcagatatttgctcaaagtttgagttcattagcatgtcgtagattaaacttttttggaattcttcgagtcgtattaaataataaaaaaccaaataacatgagaattacatattatagttttcacatctattttttacttatagaacttttttttaaaatttatttttaattatcaaaataaattttataaaataaaattcgactatttagtgctaacttcccaatacttatgcaaatacaatgtccttgatgcaagtgaagcaaggaaaataaaaaggttggaataatttgcaacaattaaatattatataatcaaaatttcaaaccaagattattaccaaaatattattattttc

SEQ ID NO: 1141 - DNA, 344 bp, Lilium asiatic
tccactcgtccgcccacgcgtcctcccacgcgtccggtgcagcggtcgactgagtaccaaggtactattcctgctccaccttccctccctaacatgaggcagccttcgactacttatgaatctgacggttcatcatatatgttctcgtcaggacagggcacagggatgttctagaatgactacatatcgagaacagctcttttttcggaggacttgcatgaagggcggtaacaacgagtatttgtagattttcgtgctagatatgatattgactggatgctctgatgatcaacgctttgctggtgtggcatgtggcttgttgtatataacacttttgccgcaca

SEQ ID NO: 1142 - DNA, 435 bp, Lilium asiatic
gatcgacccataatggttggtagagctggcgccaagattctacaggtcctcggatccaacaaagatgagcaagaggaagaggcaggagcggatcgagccgttgtacgacaggtatcacgagcctaactcatggcggttgagcaaaagacgtgcttgagagtcgtacacttttgtgcctctctgggtttgttgtgtaccaagttctgttaatatcagtgggtatgccgacattctttgaatgtccttcgagtgctgctttgttacctagctggtattgggaattgaatcttttttaccctcttattttctcaaattttgtcatatatttatgtcgtgttagattgcgtttaatgatgtatctcgatatctttgatatttaatagacacataacatatcgtgttagattactacttaccctagtatgtggccgacta

SEQ ID NO: 1143 - DNA, 446 bp, Lilium asiatic
  modified_base (370)..(370): a, c, g, t, unknown, or other
gatagacccaaaatggttggtagagctggcgccaagattctacaggtcctcggatccaacaaagatgagcaagaggaagaggcaggagcggatcgagccgttgtacgacaggtatcacgagcctaactcatggcggttgagcaaaagacgtgcttgagagtcgtacacttttgtgcctctctgggtttgttgtgtaccaagttctgttaatatcagtgggtatgccgacattctttgaatgtccttcgagtgctgctttgttacctagctggtattgggaattgaatcttttttaccctcttattttctcaaattttgtcatatatttatgtcgtgttagattgcgtttaatgatgtatctcgatatctntgaaatttaatagacacataacatatcgtgttagattactacttaccctagtatgtggccgactaagtgtatattt

SEQ ID NO: 1144 - DNA, 334 bp, Lilium asiatic
  modified_base (21)..(22): a, c, g, t, unknown, or other
  modified_base (71)..(72): a, c, g, t, unknown, or other
  modified_base (144)..(144): a, c, g, t, unknown, or other
  modified_base (230)..(230): a, c, g, t, unknown, or other
  modified_base (274)..(274): a, c, g, t, unknown, or other
  modified_base (280)..(280): a, c, g, t, unknown, or other
gttctcgggtcaggacacgtnntctctgggactggttcgagatatgacaacccatatcgatgaaccagcanngttttttcggagggactttgcatgataggtgcggtgacccaacgagaatttttaagaattttcgagccttcnaatatcatagtgacctgggatgctctgaagatcaattggaaaagctttctgtggcactggttgcttgttgtatatatacatttttnttcgtacattcaagcagatgccgggttttggtttggcttgaganaatttncctgtctggttttgcttacaaatattttgttcaaatgtgtttttctttctattt

SEQ ID NO: 1145 - DNA, 441 bp, Lilium asiatic
cgcagttcgtgtggttaggaaggacgaggtcagggaggcaatccgcgtcatgcttgagacgccaggtccgtacttgttggatgtgattgtgcctcaccaggagcatgttctgccaatgattccgagtggcggtgcgtttgaagatgtgatcatcgagggagatgggagaagttcttattagttcttttaggtaatgtcggtcaatcggtttttgcttttgttttcatgagtgttctaacagtttctttatgtttgtctacttatgagattgttcatttagttgatactttcatgttagactctttagaggtctttgtcatgtttttttcagaaatttacttatgcaacgacaaaggtgcttgtcatattgcagtatgtttcctttcgtaggaaggataatcatcttgggcaaatttctggataaagatttttaacattctt

SEQ ID NO: 1146 - DNA, 385 bp, Lilium asiatic
  modified_base (371)..(371): a, c, g, t, unknown, or other
gattattggtaaatggtatatgcaaaaggagggtgtggactataatgatgtattctctttgatagtagaacacatctatatccgagttcttttgcattagccacatactttaatatgtaactcatgtagatagatgtcaaaattgtgttcttacataactatttgaaggaagacttttatatgtcatagccctaatgatatattgctactagaaaagattgtaaattaaaaaaattcctacatggtttgaagcaatctttgatacaataggtatataaggagtgcttatgtctatgtgtgtatacctagaggctcgaggatgggcccttcatatgtctttttctttatgttaatgcttttctcattactgntaggatcatggatg

SEQ ID NO: 1147 - DNA, 210 bp, Lilium asiatic
gatgagcgcttgatgatatatgcgaatagatgatggggactataaagacgtgttttatatgatagtaatacacattaatatccaagtgataataggtggacgaaatactgaaatatgtatttagatgggattgatggcaaaattgaatacggacataactatgtgaactaagactatgatatgttataagcgaaacaatatattgctact

SEQ ID NO: 1148 - DNA, 431 bp, Lilium asiatic
cggacgcgtgggatcgagaagctcttgtcacccgtcgctaccacctcactggaagagatgattacaaaaagtattcaggtatatctcggatggtacagaaacttgtgaacatcttgaagcaaattgatccacgagacccctatcgtattcaaatgacagagatgctactcgaaaagctatacaatatgggcgcgatttcaacaaaaaagagcttggctcagtgccataaattgtctgtgagttctttctgcaggcgcaggttgtcatacattctagtgaagctgaaattcgccgagcatctgaaggaggcggtgacctatatcgaacaggggcatgtccgagttggacccgatacagtcacagacccggcattccttgtgaccaggaacatggaggactttgttacttgggtcgattcatcgaagatcaag

SEQ ID NO: 1149 - DNA, 287 bp, Lilium asiatic
cctcaatcatcgtctctcgctctcagcaatgtccggacgtggcaaggcggtcggctccgcggcggcgaagaaggcgacctcgaggagcagcaaggccggtctccagttcccggtcggccgtatcgcccgcttcctcaaggccggcaagtacgccgagagggtcggcgccggcgctccggtctatctcgccgccgtcctggagtatctcgcaaccgaagttttggagttggctgggaatgcggcgagggataacaagaagactaagattgtaccgaggcatattcaac

SEQ ID NO: 1150 - DNA, 416 bp, Lilium asiatic
cccacgcgtccgcccacgcgtccgagaaagccacaatcgccgccgccaccgcaatggccggaatctgccgcgccgccgccagatccattggcagccggctctcctcctcaacactctggcgccgatccttcggcgccgccgctgcggcggtcgattatgatacggagtgggaggaggacgagcggctgcaggatcggcgggggctgacatcagccgaggctgcgtggggggagatggaggggaggggcgtgcagtgggtgttcatggggaatcccggaccgcagaagcggatttacgccgcacgggtcgcggagcttctcgaggttccatacatctcgatggggactcttgttcggcaagagctccacccgggatcctcaatttacatcaagattgcgaatgcggggaatgaaagg

SEQ ID NO: 1151 - DNA, 240 bp, Lilium asiatic
cccacgcgttcgaccacgcttccgataaagtctcaatcgccgccgccaccgcgaagtccgtagtctgtcgagccgccatcagatccattagcagcctgctctcctcctcaacactctggcgccgatccttctgcgccttcgctgcggcagtcgattatgatacggattgggaggaggactatcttttgtaggatcttcgtggtctgacatcagccgaggcttcctgtggggagatggagg

SEQ ID NO: 1152 - DNA, 426 bp, Lilium asiatic
gtcgggttcctctggagcccacagcggaactgttgctcaacatcacgagagtatgtgaagactgctacgcaactacgtgagattctatcggtggccgaagagcacaagccagctttatgcttctctgcaaactatgaagatgctattgataaggccattttgttctttgaaaggcagcgctccggtgagctgccgtcgacccagcaggttaagtggcgcggtgattcggctctctccgacggccaactagatgatgtaaacaagaccgagaaattttgattgattgatattcaatgtgattgtaccatgttacaagcactcaatctgattgattgatcttcaatgtgattctatgtgcacgtggtctataattgcagctcagctgcttggaagaactgataataacatcaagaactactggaacac

SEQ ID NO: 1153 - DNA, 332 bp, Lilium asiatic
tcaaagccctagatttcaacctaactggaatggataccggatccatggccaagaggggcgccggaagccgcaagggcagcgtctcaagggcgaagccgatgactcgctcaatcaaggcggggctccagttacccgtccgaaggatcggccgctacctcaagaagggccgctatgcccagcgcgtcagatctggaactccagcctacctcactgccgcgctggagtatatcgctgctgaggttttggaattggctggaaatgcatcccgcaacatcatgaagaaccggattgttcctcaacatgtgtatgtggcggcgaagaatgatcaggag

SEQ ID NO: 1154 - DNA, 442 bp, Lilium asiatic
ctttggaaaggaattgtacctgggctgcatcgtcaatgcatttatggagggctaaggattgggttgtatgatccggtaaaatccttcttagttggggatagcttcattggagaggttcctttatctatgaaaatacttgctgggcttacaacaggtgctctagcaatctcagtggcaaatccaaccgacctcgtgaaagtgcgacttcaggctgaagggaagcttccaccaggtgtgccaagacgtttctcaggagcagtgaatgcttattttacaatattcagacaggtaggacttagtgctctttggactggtattggtcccaatattgcccgtaatgcgattataaatgctgctgaattggccagctatgatcaagtgaaacagacaattatgaaacttcctgggttttcagataatgtttttactcatattttggctg

SEQ ID NO: 1155 - DNA, 437 bp, Lilium asiatic
gtcgggttcctctggagcccacagcggaactgttgctgaacatcacgagagtatgtgaagactgctacgcaactacgtgagagtctatcggcggccgaagagcacaagccagctttatgcttctctgcaaactatgaagatgctattgataaggccattttgttctttgaaaggcagcgctccggtgagctgccggcgacccagcaggttaagtggcgcggtgattcggctctctccgacggccaactagatgatgtaaacaagaccgagaaattttgattgattgatattcaatgtgattgtaccatgttacaagcactcaatctgattgattgatcttcaatgtgattctatgtgcacgtggtctataattgcagctcagctgcttggaagaactgataataacatcaagaactactggaacacaaagttgaaga

SEQ ID NO: 1156 - DNA, 294 bp, Lilium asiatic
tcgcggacgcgtccaaacgagaagctcttgtcaaccttcggtacagccttagtggaggggttgagtactacaagaaatcatgtatatctcggatggaacaaaaactagagaacatcttgtatcaaactgatccagagagacctttatcgagaccatatgacatatttaacgtgctcgaatcgctataccttctgtgcgcgcatcaaacaaagtagagcgtggcttagtgccatttattgtgtcagagttctttttgcaagcacacgcgagaatacatattaatgaagcttaaat

SEQ ID NO: 1157 - DNA, 307 bp, Lilium asiatic
tctacatctctagcggacaccctttctacctttttagttttattttttaagaacgccaacagggattgggcctattttaagcagtcctacttttattccaataacaatgtaactatttaatactttttatcttgccaacaaccacctattaatctggacaacctcatttccatccatcttaaaagccacttttttctgaatctcctattacgatatcccgaccaaatcatatttgtaaacctttctcttgataatatattttaatgcaatttattttttatcaacttctatatcctatccgttttta

SEQ ID NO: 1158 - DNA, 186 bp, Lilium asiatic
ccgggccggaaaaacgggccgacccacgcgaccgcggacgcgtgggatcgaattataattgaaaatcttacctacctcctcactgggaaatatgttgtctataagtataaaagtatatctcggatgaaacaaataactatgaatatctggaagcaaaattatcctcgggacccctatctgattcaa

SEQ ID NO: 1159 - DNA, 440 bp, Lilium asiatic
ctgctgcaacaaattataattgtcgtgttgttgaatgctttttaccatctattgtccttgccattaagcgtggaacggatccattagaggcaatttccatagtgaaaactctttctgatgttgaggggttgtgtaaatcatttgctggtacccacggatcttctcatccagtattggctgtcaaggaattcttgatagaggaacattatactgcataataaattgacataatcacggcagatagtctaccttaaatatttaaagactcagttagttcattggatgttataagagctgttaagcactacaagttatttcagcttgcctgccatgtttatgcttaagctaagcgtttccatgcatttagggacactgttttatcaaaactcagtgattaagacatgcttaaaaggcttggggatcttatgaatgatatccac

SEQ ID NO: 1160 - DNA, 275 bp, Lilium asiatic
ctagaattcagataaatatggtaggcaatcataggccaacttcaaatacatatgcgatgagagccggacgtactggtaaggcggatgcatgcgaacaacgactattgccagaacgagcgggtacagaagggttccgttagattgaaagggaacagatgatgacgaatgcttatatacactggagattcgggacatgatggtctggactaaacgcggccgattttctggggaagacttttacgttatggcacatcaatgacatgagggttacgcac

SEQ ID NO: 1161 - DNA, 438 bp, Lilium asiatic
tgattctcttaagcttccaactgtggtcccttggcacgcctggtatgatgatggccaggttggaggatggacccaagtatacaaagggctcacatttgtgactgtaaggggagctggtcacgaggtttcgctgcaccgaccgaaacaggctctcgtgctcttcgagtcgttcgtatcagggagtccaatgccgacactgtctgtactcgctgacgcctgaactctactgcagaaatattcaccatctctgtgacgaaggggagggaggtaatcatcggcaactttcctgtacaaactgaaataaaaggaaattggaggaaaaaaaatcactgctggtttggcgcgaacgccattatatattatatgaaggaattttatggcttggctaatgttatcatatttaatggggatgggactttattttggatggtaatttgg

SEQ ID NO: 1162 - DNA, 324 bp, Lilium asiatic
gtctttcaaggggcatctttaggccctcttttcaaattggctattgatgttgacccgagcatcctaatcactgcatttgtgggaactgccttgacttttgcatgtttctcgggtgcagctattgtagcgaatcgtccggaattcttgtatctgggtggtttgctgacttctggtctttcaatactgatatgggttcaatttgctttcttgattgtcggacattcctctgctagctacaaacgtgagctgtatcttgggctactgatattcttgtgatacatggtgtttgatacccaagacatcatagaagggcacatacagggg

SEQ ID NO: 1163 - DNA, 117 bp, Lilium asiatic
aggacacgccccccctcggcgcattaattacatgcgtgtgtggttggttatctcatcatgatctctacacttttcattgccctaacggccgcgcccttttcttttttatccttttct

SEQ ID NO: 1164 - DNA, 423 bp, Lilium asiatic
caggaattatggtgccagcagtgcaatatctggtgcatcgataaattgtcattggctcaacatcaaattgggaaaaaacatgctgctcgtctcctgaaactaaagcttccgaaaccaaatctttttgggacacagcagcttgatattcaatgcccatcagtggaaaagacagccggtctgtggtgcaatctctgcaacattccatgcatgactgagttcaatctcgagcaacacctccaagggaaacaacacaaggctaaaatggaggaggttggtgatagtcagaacagtgggaacgagaaacagaaacaggtcttctggtgctttgaatgcaatatctggtgcatcaatgaaatggcgttggctcagcatcaacgcggaaagaagcacgctctccgtcacctataactaaagggtttgcta

SEQ ID NO: 1165 - DNA, 440 bp, Lilium asiatic
gttctggtgagattccatattctttgatcattgacacacttcagattgaagacgaggaggtagagtgttgggttgtgaaagcaatcacttctaaacttctggactgtaagatggatcagatgaaccagattgtaattgtgagccgacacatggagcgcgtgtttgggatgtctcaatggcaaggtctccgtacaaagctggcggtttggaggggttacattggaagtgcgattaccactattaaagcgaacaaagtatccgatgaaggcttacctgcaatgcaaggtttggcgatccggtgattctgacttatagagagcactgaacatcagaggattctttttgtggtttgagttgctaggtaccttcactattgtagtgtggatacatttaatgtgtttgggagactgcaatgcccatgtttcttcatgatgggacct

SEQ ID NO: 1166 - DNA, 446 bp, Lilium asiatic
gttctggtgagattccatattctttgatcaatgacacacttcagattgaagacgaggaggtagagtgttgggttgtgaaagcaatcacttctaaacttctggactgtaagatggatcagatgaaccagattgtaattgtgagccgacacatggagcgcgtgtttgggatgtctcaatggcaaggtctccgtacaaagctggcggtttggaggggtaacattggaagtgcgattaccactattaaagcgaacaaagtatccgatgaaggcttacctgcaatgcaaggtttggcgatccggtgattctgacttatagagagcactgaacatcagaggattcttttttgtggtttgagttgcgaggtaccttcactattgtagtgtggatacatttaatgtgtttgggagactgcaatgcccatgtttcttcaggatgggaccttataa

SEQ ID NO: 1167 - DNA, 205 bp, Lilium asiatic
tacacgatccaaggtttcattctcccgcctgctcaataacttctgctttattaaatcaccagggtctaatggtctgaccggcattttacatcctgctcacttcctaaaccttaggcttacctaacctaatctcctatctacacatcccccttttgtccaatggcgaacaatcgaaaagacacccacctttcgaacactttcaaca

SEQ ID NO: 1168 - DNA, 89 bp, Lilium asiatic
atcgaaggtaacatggggccggatgcgaagtaattggtgcattatagaatcgccagaggctaatggactgatcggggatatacatgctg

SEQ ID NO: 1169 - DNA, 286 bp, Lilium asiatic
gcaacaaattataatagccgtgttgttgaatgcctcttagcagctatagtccttgacattaagcgtgttacggatccattagaggcaatttgcaaagcgaaaactctctctgacgtacgaggggtcgcgtcaatgattttctggctccaactgagcgttagatacagtattaggtgaaaaggcatcctcttatgattaaccttatactgcagaatagagtaagagaatcacggcagagatgttgcccttaatatgaagagactgaggtatgccacagaatgaataa

SEQ ID NO: 1170 - DNA, 338 bp, Lilium asiatic
cttgaattcagcaaaatattggaggcaatcaaggccaacttcaatgacaaatttgatgagatccggaagaaatggggaggtggtgtcatgggatcaaagtctcaggccaaaacaaaggccaaagaaaggctccttcagaaggaaattgcccagaggatgacctaggcttattcacttttgtgttttggtagtggatgggctaggctaggctaggcggcttctcttccctttagttttaccttaccccgttgcattgtgctgagagtagtgaactaaatacttttaatctgtgaaatgaatgcttgatgatttaagctatgttatggtcttcttcagac

SEQ ID NO: 1171 - DNA, 324 bp, Lilium asiatic
cttgaattcagcaaaatattggaggcaatcaaggccaacttcaatgacaaatttgatgagatccggaagaaatggggaggtggtgtcatgggatcaaagtttcaggccaaaacaaaggccaaagaaaggctccttcagaatgaaatagcccaaaggatgacctaagcttattcacttttgtgttttggtagtggatggtctaggctaggctaggcggcttctctctccttgagttttaccttaccgcattgcattgagctgagagtagagaactaaatacttttaatctgtgaaatgaatgcttgatgatttaagctatgttat

SEQ ID NO: 1172 - DNA, 247 bp, Lilium asiatic
cttgaattcagcaaaatatttgatgcaatcatggccaacttcaatgacaaatttgatgagatccggaagaaatggggaggtggtgtcatgggatcaatgtctcaggctaaaacaaaggccaaagaaaggcttcttcagaatgaaattgcccaaatgatgacctaagcttattcactttttgtgtttggtagtggatgggctatggctaggctaggcggcttcccttccctttagttttaccttaccc

SEQ ID NO: 1173 - DNA, 440 bp, Lilium asiatic
tccccataaataacttttctccttccactacttggtagtcggagaacatagctctgacagcacatatatgatgcgtagctccagtatctacgaaccattatcggggatttccaacagtattgcattcggagatgacgactgatagattcatatcgttcattccactcgtcacgagttcagcaacatttaactgtcccttctgcttcggtttccggcattccgccttcctgtgtccaggcttgccgcaattgaaacatgtacctttgaagcgcttgtcatccttgcctttatagacataattatcactggcattgaacttgctcttcttatctttgttcttggtagatttggactccaccaggtgtgccttggaatatccaacttggtttcctttgtcagagacccggttgttttcttcgatgcgcagtctgaccaccaac

SEQ ID NO: 1174 - DNA, 446 bp, Lilium asiatic
ccggagcatccgagcggctatcttcagatcttcggcaccggagcatccgagaaccatgggtaacttcagattccatcagtaccaggttgtcggacgtgccctcccgaccccgacggatgagcacccgaagatcttccggatgaagctgtgggcgacgaatgaagtcagggcaaagtccaagttctggtacttcctgcgtaaattgaagaaggtgaagaagagcaacgggcaagttcttgccattaatgagatttttgagaagtatccgaccaagatcaagaactatggcatctggctccggtaccagagcaggactggctaccacaacatgtacaaggagtacagggacactactctgaacggggctgtcgagcagatgtacactgagatggcatctcgtcaccgtgtccgttttccatgcatccagatcatcaagactgccacca

SEQ ID NO: 1175 - DNA, 419 bp, Lilium asiatic
  modified_base (401)..(401): a, c, g, t, unknown, or other
ccggagcatccgagcggctatcttcagatcttcggcaccggagcatccgagaaccatgggtgacttcagattccatcagtaccaggttgtcggacgtgccctcccgaccccgacggatgagcacccgaagatcttccggatgaagctgggggcgacgaatgaagtcagggcaaagtccaagttctggtacttcctgcgtaaattgaagaaggtgaagaagagcaacgggcaagttcttgccattaatgagatttttgagaagtatccgaccaagatcaagaactatggcatctggctccggtaccagagcaggactggctaccacaacatgtacaaggagtacagggacactactctgaacggggctgtcgagcagatgtacactgagatggcatcttgtnaccgtgtacgttttcatg

SEQ ID NO: 1176 - DNA, 441 bp, Lilium asiatic
atacaaaaggagtccaccctccacttggtgctgcgcctcaggggaggcatgcagatctttgtgaagaccctcaccggcaagaccatcaccctggaggttgagagctctgatactattgacaatgtgaaggcaaagattcaggacaaggagggaatccccccggatcagcagaggctcatctttgctgggaagcagcttgaggatggccgcaccctggcggactataatatccaaaaggagtctaccctccacctggtgctccgtctcaggggaggcatgcaaatctttgttaagacgcttactggtaaaacaatcaccctggaggtggagagctccgatacaattgataatgtgaaagctaagatccaggataaggaagggatccctcctgaccagcagaggcttatctttgctgggaagcagctggaggatggtcgcaca

SEQ ID NO: 1177 - DNA, 436 bp, Lilium asiatic
tccccataaataacttttctccttccactacttggtagtcggagaacatagctgtgacaggacatatatgatgcgtagctccagtatctacgaaccattatcggggatttccaacagtattgcattcggagatgacgactgatagattcatatcgttcattccactcgtcacgagttcagcaacatttaactgtcccttctgcttcggtttccggcattccgccttcctgtgtccaggcttgccgcagttgaaacatgaacctttgaagcgcttgtcatccttgcctttatagacataattatcactggcattgaacttcctcttcttatctttgttcttggtagatttggactccaccaggtgtgccttggaatatccaacttggtttcctttgtcagagacccggttgttttcttcgatgcgcagtctgaccac

SEQ ID NO: 1178 - DNA, 343 bp, Lilium asiatic
gccccataaataacttttctccttccactacttggtaggcggagaacataggtgtgacagcgcatatatgatgcgtagctccagaatctacgaaccattatcggggattggcaacagtattgcattcggagatgacgactgatagattgatatcgttcattccactcgtgacgagttcagcaacatttaactgacccttctgcttctgtttccggcattccaccttcctgtgaacaagctagccgcaattgaaacatgaaccttggaagcgcttgtcatccttgcctttatcgacataattatcactggcattgaacttactctaattatctttggtcttggg

SEQ ID NO: 1179 - DNA, 423 bp, Lilium asiatic
cggacgcgtgggttcacatattgcgtggttgcggtcgagtcatctggtagacaagtacctatgtcatttttggagagggttaaggaagacttcaacaaaagatatggaggaggaaaggcagccactgcaggtgccaacagcctcaaccgagagtttgggtcaaaactgaaagaacatatgcagtactgtgtggatcaccccgacgagatgaataagatggctaaagtgaaagctcaggtgtcagaagtcaaaggagttatgatggaaaatattgaaaaggtcctggatcgcggtgagataattgagctccttgttgacataaccgataatcttcgctcccatgcgcatgatttcatactacagggtacacatatgaggaggaagatgtggtttcagaatatgaatataaagctgattgtgttg

SEQ ID NO: 1180 - DNA, 230 bp, Lilium asiatic
caaactcgtaaatacacatattttttgatttttttcgactcagctggtagacaagtacctggcgcatttttggagagggtttaggaatacttcaacaaaagatatgtaggattaaaggcatccactgcatgtgccaacatctctaaccgagatttttgttcaaaactgaaataacatatgcattactgtttttatcaccccgacaagatgaataatatgtctaaagtgaa

SEQ ID NO: 1181 - DNA, 424 bp, Lilium asiatic
atacaaaaggagtccaccctccacttggtgctgcgcctcaggggaggcatgcagatctttgggaagaccctcaccggcaagaccatcaccctggaggttgagagctctgatactattgacaatgtgaaggcaaagattcaggacaaggagggaatccccccggatcagcagaggctcatctttgctgggaagcagcttgaggatggccgcaccctggcggactataatatccaaaaggagtctaccctccacctggtgctccgtctcaggggaggcatgcaaatctttgttaagacgcttactggtaaaacaatcaccctggaggtggagagctccgatacaattgataatgtgaaagctaagatccaggataaggaagggatccctcctgaccagcagaggctttatcttgctgggaagcagc

SEQ ID NO: 1182 - DNA, 396 bp, Lilium asiatic
cggacgcgtgggttcacatattgcgtggttgcggtcaagtcatctcctatacaagtacctaggtcatttttggagagggttaaggaagacttcaacaaaagatattgaggaggaatggcagccactggaggtgccatcagcctcaaccgagagtttgagtcaaatctgaaagaacatatgcagttctgtttatatcacccctactagataaataagtattctaaagcgaaagctcagttgtcagatgtctgatgagttatcatagacaatattgaaaaggtcctgcatcgcggagagaaaatagagctccttgttgacaaaaccgataatcttcgctcccaggcgcatgatttcatactacagggtacacaattgaggtggaagatgtggtttcag

SEQ ID NO: 1183 - DNA, 445 bp, Lilium asiatic
cggacgcgtgggggatttgcagtgtgagacggataagttgacacatttctatacctttattcttcgtccggatgcgacttatagtattttgattgataatcgggagagggactctggtagtatgtatacggattgggatattcttccaccgcggaagattaaagaagttaatgctaaaaagccgaaggattgggatgatagggagtatattgaagatccgaatgatgtcaaacccgagggatataattcgattcctgctgagattccagatccaaaggctaggaagcctgcctcgtgggatgaagatgatgatggtatatatgaggcaccaaaggtgccaaatccagcatatagggggccatggaaacccaagaggatcaagaatcccaactattaaggcaagtggaagatcccttggattgacaatccagagtttgaagatgat

SEQ ID NO: 1184 - DNA, 437 bp, Lilium asiatic
cggacgcgtgggttcacatattgcgtggttgctgtcgagtcagctggtagacaagtacctatgtcatttttggagagggttaaggaagacttcaacaaaagatatggaggaggaaaggcagccactgcaggtgccaacagcctcaaccgagagtttgggtcaaaactgaaagaacatatgcagtactgtgtggatcaccccgacgagatgaataagatggctaaagtgaaagctcaggtgtcagaagtcaaaggagttatgatggaaaatattgaaaaggtcctggatcgtggtgagaaaattgagctccttgttgacaaaaccgagaatcttcgctcccaggcgcaagatttcagacaacagggtacacatatgatgaggaagatgtgggtgcagaatatgaagataaagctgattgtgttggtcataataattgc

SEQ ID NO: 1185 - DNA, 346 bp, Lilium asiatic
cggacgcgtgggcttcatttcgcggcgagctgtataagctcctccgttttcttcatttctggttcgagcagcgtgccgtcacgtatgttgcgagccttgcggcggcgctggcttattgccatgggaggaatgtgattcaccgggatatcaagccggagaacctgatgctcgatgttgagggacggctgaaaattgccgactttggatgggccgtgcagtcgaatgctaagagacacaccatgtgtggtacgatcgattaccttgcaccagaaatggttgagaaaaaagagcatgattattcttgcgataattggactgtaggccttctttgctatgagtttctcta

SEQ ID NO: 1186 - DNA, 424 bp, Lilium asiatic
ctttagggttttggttctcctccaacctctctcaagatgaagctcgtcaggtttttgatgaaactgaacaatgagaccgtctcgatcgagctcaagaacgggacggttgttcatggcaccatcacaggtgtggatatcagtatgaatacccatttgaagactgtgaagctcacagtgaaagggaagaatcctgttactctcgatcaccttagcgtgcgtggtaacaacattcgatactatatcctccccgacagcttaaatctggagactttactggttgaggaaacacctagggtcaagccgaagaagccgactgcagggagagcaatgggccgtgggcggtgccgtgggcgtggacgcggtcgtggccgtgggcgttgatgtgtgccacctgcatcttaactttttggtctgtgtcatcttt

SEQ ID NO: 1187 - DNA, 266 bp, Lilium asiatic
tcgtcctcgagttcgcagctcgcggcgagctgtataagctcctccgaaaactccatcacgtgtccgagcagcgtgccgccacgtatgttgctagccttgcggcggcgctggcttactgccatgggaggaatgcgatgcaccgggatatcaagccggagaacctgttgctcgatgttgagggacggatgaaaagtgccgactttggatgggccgtgcagcctgatgctaagagacacaccatgtggggtgcgatcgatatccttgga

SEQ ID NO: 1188 - DNA, 249 bp, Lilium asiatic
gaagaaagcgagcacagcggcgccggcggcgatttcctcgccgaggaagaccaggagtgtcacctccggcaagcgggtggcgctggtgtctgcgccgccgaaggcggcggtcgccaagaaggtgaaggcttcggcggcgaagggcaaggccaaggagccggccggctcgaaggccaagggtaatggggaggcaccctcggcagaggggtcggccaagaccatcatcgtggaggcctgcaaacaatgttc

SEQ ID NO: 1189 - DNA, 180 bp, Lilium asiatic
tgtaagcattaagttccatgcccccaacatctgtactttatcgacagtctggcagctggccaaggcagacgacaatactgggaagcgctatgtgaccgtcgggggagttcccggcaaagagaacacttgcttcacgatccatacatatggcaggcatgcatacaatctagtgtacttgcc

SEQ ID NO: 1190 - DNA, 358 bp, Lilium asiatic
cggacgcgtgggcaaagccacaacacatacatgaaaagcaagcaagaatcatcggaataatggctcgtgcatgtgtgttcctcgtcgtgctcctcctggccgccatcgcggtggcaccgttcgcgggcgccgcacgcgtggacgtcgtggagggtaggtccatggcatccgccgatgcaccggaggcggcggccgatgcttccgctcctagccccgactccgcctcatccccagactcatcgtcagaggcgccctccagcagcagctccttcgactagacgcaaaaacctcttcattctctggaataactaacagtatatacgttgcacccctgatgatatagaaaacatgtacgtgc

SEQ ID NO: 1191 - DNA, 426 bp, Lilium asiatic
ggagcacaggttatttctgatgggtctgaataaatatggtaaaggcgactggaggaacattgcccgcaattttgttgcctcaagaacccctactcaggtagctagccacgcccagaagtacttcatcaggcaaaaatcgggtagcaaggacaagcggagatccagcatacatgacatcaccactgtaaacctccaagaggcgaggccagcctctccttcccagcagctatcgatgcagtctacatccaccaatgctcccgggacatcagaccaattctccaacatggtcgatgcgattcagcgcaacgaggtcgttggtctattctcgcaggcgccttatgggatcaactcttacataatgaaatcgcaggcgcagcatttgcataggagtgcgcttgatattttcatggttgggcaacatatgtt

SEQ ID NO: 1192 - DNA, 331 bp, Lilium asiatic
cgagatcatcagccgatttgagaagaagggattctatctgaaagggctgaagatgcagaacgttgagcgatcgttcgccgagaagcactacgcggatctgtcctcgaagcccttcttcggcgggctggtggagtatattatctctggtccggtggttgcgatggtgtgggagggaaagaatgtcgttgtcactgggcgcaagatcatcggggctaccaacccggcggagtcggctcccgggactattcgtggggatttctcgatcgagattggaaggaatgtcattcatggtagtgattcagtcgatagcgcaaggaaagagattggtctg

SEQ ID NO: 1193 - DNA, 394 bp, Lilium asiatic
  modified_base (331)..(331): a, c, g, t, unknown, or other
cggacgcgtgggaatgctgaaagttctcacttaaattttcgactaaggacaaatgatctctctcccccaaatttattcacgcaagggaatatctctaggcgttctggtgtttggtcacccaatcaaccacctcctctactcatcccgttcaatcactcgctggagtcgaggccagtgatttccgaaagtcagcgtcacatgcaaatcattcatggcttgcctcggcacatgcactcttttccttggagtggaacttctgatccaagagtagctaattcttcaaactctttatctttagaggaaaggtcgaacactacaagagacgaaacangctcaagaactatgctaagaaacaactttcaagagcaggcaccgtttgtgccgacagccgata

SEQ ID NO: 1194 - DNA, 437 bp, Lilium asiatic
ctgtagcgttggtgatccttgactgcgtatcttaggagtttaatgcgccgctggcccgaggggacggcttaaggataccgattggcgcgcattcgaatgctgaggtgcttctggctttggctattctaggttttgtagtctcgcaagagctataagcctacgaataagccgctgactgatcaggaagtaaatcatctgcgcgatgaatggctaccggagtctcttcatccgtcgattactgaagagatgcttgctcaaccgacgacattagaaagcgctgctggtcctcatactataattgatggcaaagaagttatcaaccttgcatcagccaattatctacgattgataggacatgacaagataattgattcatgcattggttcattggagaaatatggagacggttctttgcgtcctcgcggtttttatgggac

SEQ ID NO: 1195 - DNA, 338 bp, Lilium asiatic
cggacgcgtgggcggacgcgtgggtcaatttcccatggcctgagatctccgattttgcgttttgagttcggggatcctcaatttctcattgcctgagatctccgattttgcgcacatcttcggagaggattgtgttccaatgactgctgcgcagatataaagcaaagcagcataagactgcagatgtcctctcatatcagtgtagaagttgaaacacacttcttttgtattcacgtagggctattggaaattggaggtttagaatataattgtcaaaagtcgaccaggttaggacccaactccaatgaattgggcttggacccgagtttagtcatttt

SEQ ID NO: 1196 - DNA, 325 bp, Lilium asiatic
ctttataggaggatcaaatgggtgtggccgccccggtctcatattcatggtcgtgtcacgtgacaatggactggagggccgcgagattatacatcatctagttgcgactttgggtcgatactttggcagcgtctgtgagctcgatctgattttcaatgttcacaaggcatactatatactggatgagattctgattgctgggaactccaggagtccatcaagaacactgtgcccagactcataactagtcatgatttcttggtggaaacagccaaagagcaagctagttcgatcagcaatataattgcacaggctaccaaataga

SEQ ID NO: 1197 - DNA, 351 bp, Lilium asiatic
catcattcgaggacccgagggagcggtccctcccaccctcatctacatgggcggtagcgctgcgccgcccatgccacgtcagcatcctcatctctgatcggagtcctccaattttcctgtaatacccgatgtctcagcttaatttggtttgcattgactgaagtgagttttatttgcatatcctttactctgaatttgaagcgctttgtttattaccatttgtatacttgattgaacatacactaagcaagagatgaaaagccaattagcctttacattgtaatagaaaatgtaggttttctccctcgcgaggaagagatctgctgatggggatcaacaacaaagggggat

SEQ ID NO: 1198 - DNA, 355 bp, Lilium asiatic
ataatttcaacaacatcgtagaaagaggtgaagttggaactgtatataaagctaagtttcatgacggctttatggctgctgtgaaacggattaacaaaggttcagagcaaggtgaggaagagttttctcgagatacagagcgtctaggcaggctgcatcatcgccagatagttgctctcagaggctactgtgctgagaagcatgagagtttgttcgtatttcttttttaggtttctggtctatgaatacatggcaaatggaagcctaaaggatcatcttcatctgccaaacagaagtccattatggtggcagactagaatccagattgccattgatgtgggccaatgctctggag

SEQ ID NO: 1199 - DNA, 310 bp, Lilium asiatic
tcggcgggctcatctacgaggagacccgtggggtgctgaagatctttttggagaatgtcattcgtgatgccgtgacctacactgagcatgcccggcggaagacggtgacggcgatggatgtggtctatgccctcaagaggcaggggaggacgctgtacggctttggcggctgatgggtttggtctcctgcaagcttaagtggtgctggcgtctatttccttttgctggtgaatgttaatgctatggcttcttaaaattatcagatttctcatctgattttgaatcttgaaaaagttaatctggagggttc

SEQ ID NO: 1200 - DNA, 400 bp, Lilium asiatic
cggacgcgtggggcattatcagtgtatttggagaatctggcaacaactttaggttccagagaacagttagcaattgcagagtttgctgaatctcttttgatcattcctaaggtacttgctgtcaatgctgcgaaggacgcaactgagctagttgctaaacttcgagcttatcaccatacttctcaaacaaaggcagataagcagcacctttcaagtatgggactacatctttccaaaggcactatacgcaacaatctagatgctggtgttattgaacctgcaatgagcaaagtgaagataatacagtttgcgactgaggcagccaatacaaattctgcgggattgccgaatatgataaagctttgtaaaagatgagcaagaagggcgaagaatgagattt

SEQ ID NO: 1201 - DNA, 436 bp, Lilium asiatic
cggacgcgtgggtgctagggtagtaggatgcactatatgcagcgtcaaattccttcttaccatcctcggacaaggagttgtacacggcgagcatggacattctgtacgagtgctacgaggatgtggcttgtggaagtgagattcgcagtgttgttttggctggacgccgcttttatgaaaaggaaggcctccctgcattcccaatgggcaaaattgatcagacaagaatgtggaaagttggcgagagagtccgtgcgaaccggcctgaaggagatttggggccgctgcatccatttactgctggtgtttttgtggcattaatgatggctcacatcgaggtcctaaggaaagaagggtcattcctactcggagatcatcaacgagagtgtgattgagtcaggggattccctaacccctttatgcatgctcgaggggt

SEQ ID NO: 1202 - DNA, 342 bp, Lilium asiatic
ccccggagtttcaaggcgtttgcgtcttctttgaaagttaataagccggcaaatgggtttgatcatggacatgtttatgggaacaagaaggatgctcaatccgctggtcatgcaaccgggaagatgaattcgaatggagatgataggagaaatgcaaccaaagtccatcggcctgtggtttcagatgttcaaccgcgagtgcctgccccaaaacgatcatggcttcatttgtttacccgttcttccgctgtttctccatgctcagatgctaatactagtcatctacaatctgaaaatgtacatgtatccgatcaaaggatgtcacctgataaattatcaatt

SEQ ID NO: 1203 - DNA, 354 bp, Lilium asiatic
gttgtcaacatgaagtttgacgaggagcctaactattccaagctaatttctttgtttgaggggctaatcgggcctaatccatcagttaggccaatcaatactgatggtgctcaaaagattatgtatcaggttggccaaaagcgtggcagattagctcttgatgaagaagatgatggccagatgaagaaaaaggttcgcctaagtgttcctgctacccaatggatttctgtatataatgccaagatgccgatgaaacaaaagtaccactataatgttggcgaggtacgattagcacaacatgtggagagagggaatgaaaatggcttacttataagttgcgtgcatcttgctctg

SEQ ID NO: 1204 - DNA, 106 bp, Lilium asiatic
gtttgacgaggagcctttttattttaagctcaattgctttgtgtgcggggctaagcggacctaattcatacagtaggccaatcaatactggtggtggtgcaaagaa

SEQ ID NO: 1205 - DNA, 330 bp, Lilium asiatic
gaggctggttattttgttatcacaaattaaaataaactctatggcagttgtccatatggaaacatcagacggatatacagcattcaaggagtcaaaagggctttgcgcaattgatgagccttttagttgtactgtagaacaggtcagagtaggccaggctatatattcaactgggagcttgtttaatcattcctgcgtgccaaatatccatgcttatttcctctcacgtaggctcttgctacgatcgacagaatttgtccaaagctggcatccacttgaactgtcctatggcccgcaggctggacagttggatcttcgagataggcagga

SEQ ID NO: 1206 - DNA, 148 bp, Lilium asiatic
gttcatccaaagcattcgaccgattgtatttagatcttatggacaagctcatccgacaactattgctaaccgtggacgcgatcagcacaatgtcggcgcacgggcgctatacaccgactgagatgaacgcaacaaaatgtccgggatg

SEQ ID NO: 1207 - DNA, 311 bp, Lilium asiatic
cggaccggcccggaagacccaggccgacccaagcgttcgacatattgtatttatagacaagacatgtgtatttttaccaggtctgcgtgctgattaaaccagcgaaatctaatatcaaaatctgctatggctggactaaaatctgcatgggaatattagaaggcaatcagatgaggtagatccgttgccatgtttagtgcgcttgcatggcaggtcataatataatttaagagttctacccttcttatgtcacaattgcttgatgctgggacttccattaaggtgcatgacaaggcccctacgcttgtttt

SEQ ID NO: 1208 - DNA, 393 bp, Lilium asiatic
  modified_base (243)..(243): a, c, g, t, unknown, or other
gtcagcttcattacagtacagctcttggatccgtgagatgcagcaagcttcagataaatcaataattatcagtgagatcttggactccaggactagaaaccttgtatctgtgtccagaattagtgactatgttctgtcaaatgaactggtgagcatggccctagctatggtagctgaagacaagcaaatcaaccgcgttcttgaggagctctttgccgaagaggaaaatgaaatgtgcatcangccagctgagtattatctgtatgagcaagaggaggtgtcttttttccgacataatggttagagggcgtgaaaggcaagagatagtgattggttatcgccttgccaatacagagcgtgcaataataaatcctacttcgaagatggagccga

SEQ ID NO: 1209 - DNA, 225 bp, Lilium asiatic
cacaattctccgagctctttcgtttctctttaaggtcctctatggccgctgtagagacagcccccgccgttacaattgagcctccgcctgttgagtctaccttggtggaagggccagtcacatcagatgtgcctacggcgaatcttgccaacgagaaagtcactaatgctcccaaagaaaggcacgcccattccaataaaacggccctacgtactacctatatag

SEQ ID NO: 1210 - DNA, 320 bp, Lilium asiatic
cggacgcgtgggctcagaaggtgcaatcatataagacactttgctaatgggagcggattattacgagacggatgccgataagagattcctatccgccaaaggtagtgttccgattggtatcgggaaaaactctcacatcaaaagagcaattattgacaagaatgcccgcattggagaagatgtgaagatcattaatagcgagaacatccaggaggcggcgagggagaccgatggctacttcatcaagagtggcattgtgactgtaatcaaagatgctctgatccccagtggcactatcatataaacctttatgtatcttt

SEQ ID NO: 1211 - DNA, 437 bp, Lilium asiatic
ggacaagttgcctcctttacaaaacaaagaatacactaggggcaatttttcgggacgaggaaggtttggacgtggtggtggcagcagattctctggcggtaggggaggcagcggaggcgggttttctggcagaggcagtcgtggaaggggtggtggtggccggttcagtaggaggaattgaagcagtgcctgttggggaggtttattaagttatgtttgatgtggagggccatatatggcccaagagttttgtaggtaggctctgcttagaagttaattgcttgccttatttgttgtgtaaaattttcatacaatatgttataaaaaaaatctggatgggcaaatctgataaagtctatgaaacctatgcaggaatggtaaaaaaagtctaggaaacctttgttggctttaagataatgcaaatatttatattctct

SEQ ID NO: 1212 - DNA, 243 bp, Lilium asiatic
acgcggacgcgtgggccgaactctgtccttatgataggccagaaagcccccgtgacggcgaggaggaatttactgatgacgaaggcactcactataagtggtgccgcaatcttagggcatgggctcctgccgataactcaacaggtaaaatcgatgaatatggacctgaagcgatggcattcacacctgaggaagagactgtcctgccttcaggagccgaggacattactgtggcttaacaaa

SEQ ID NO: 1213 - DNA, 215 bp, Lilium asiatic
atcaattaagatttgatcaaatttagggtttgatttgatcgatcaggccgtcgtcatggcatccaagcggatcctgaaggaactcaaggatctccagaaggatccacccacctcttgcagcgcaggccctgtcgctgaagacatgtttcattggcaagcaacaataatgggtcctccagacagtccttatgcagggggagtctttctagtaacca

SEQ ID NO: 1214 - DNA, 387 bp, Lilium asiatic
cccacgcgtccgcggacgcgtgggagtggaaatgtggcgcagctccaattacggctatgatgacggtgaggcgatggtcacgtggtcctgcatctactccagttggaaagccggcagtccatcctgcttctgtcgacttgaaaggaaaagcatatgagttgctgagacatagtggttcaagtttcttgatggatgatatataccgaaaccctggtccacttcagttcgaagggcctggtgctgatgctaagagtattacgttgtgtgttgaagatcaggattacatggggcgaattaagttgctccaggaatacctggataaggtgaagaacattgtaaagccaggatgttcgcaggaggttctgaaagcagctctgagttccatgg

SEQ ID NO: 1215 - DNA, 399 bp, Lilium asiatic
cggacgcgtgggcggacgcgtggggttccggagaatatatcttttccaaccctagcggcgctccgtgttgagcccccctcccggcggtttcaatctaagctttgaaaaggaggcgacgctgagagagatgctgcaagaatcacccttcgtccaggttggtatctctgagccggggcacgagggtgggcatcatgagtctgggcactccagttcatcaatctccaaagcactcacggggttgtccttcgttacgcctgctgatcctaatgcctcaaacgaagaaacatactcttttccagactctcctgatcccatggcctctgaccaagaaacagactctattatagattcagtagagtcattacttgactctgactatggtgggggatccaatggatg

SEQ ID NO: 1216 - DNA, 428 bp, Lilium asiatic
ccgcaacgaagttttaagtgttgactttcattcctcggatatttatcgcatagccagttgtggcatggataacaccgttaagatttggtcaatgaaagagttctggacatatgtcgagaagtcttttacatggacggaccttccgtcgaagtttccaacaaaatatgtccagtttccagtgttcacagcttcagtgcactcgaactatgtggactgcaatagatggcttggtgatttcatcctatccaagagtgttgacaatgaaattgttttatgggagccgaaaaccaaggaacaaagtccgggagagggtgctgtcgatattctccagaaatatcctgtgcccgattgtgatatcttgttcatcacattctcatgtgattttcatttcaatgcagcagcaatttggaatcgtgaaaggaagattt

SEQ ID NO: 1217 - DNA, 415 bp, Lilium asiatic
ccgtcatcttcgccgctagggtttcatcgtttagctagccagaagctgagaagatggtgctcaagactgaactttgccgttttagcggagccaagatctacccagggaaggggatcagatttgttcgagctgattctcaggtctttctctttgccaactctaaatgcaagcactacttccacaaccgcctcaagcctgcaaagcttgcctggacagcaatgtacaggaaacagcacaagaaggatatccatgctgaagcagtgaagaagaggcgtcgcaccacgaagaagccttattcaaggtccattgttggtgcaaccttggaagtaatccagaagaagagagctgagaagcctgaagttcgagatgctgctagggaagcagctctgtgtgagataaggaacgggtgaaaaag

SEQ ID NO: 1218 - DNA, 402 bp, Lilium asiatic
ggaaagaaaaaggcgcgaacatcgatctaagcgttttgagaagggacaggagaatcagacagcaatcaagcatcccagaccaaaaaatgctgaagcagcaaacatctacacaagaagagcaaacatgatgatgcctgccaaaaataatgatgatggctttagcagggcagtagaagatattgattgggatgctctcacagtccggggaacctgccaggaaattgagaaacgctatctgcgtctgacagctgcaccagatcccaccactgtgagaccaaaagagatcttggagaaagctctacatatggtacatacttttcagaggaattatctttataaatgcgaacaacttaaatccatacggcaagacttgacagtgcaacacatacagaatgagctaac

SEQ ID NO: 1219 - DNA, 427 bp, Lilium asiatic
cgcaaaccgagacaaaggcacaccgttcacaatcgaaggagaccgtggaatcggagggggaagagtacgagacttaggaggtagaaaaatctaacaattcacaagggaactccataggagaagaacgagacaagtaggaggatgacctaagacgaaaggaagcttagtaggagtcgtacgaaagctgaggtcttatgagtgggaggaaataaccgagaatcctcttcaaattgggcatggcgagagatgagaacgcggtgtgccgtaagatcattgcatcaatatcattgatgctcaagattgctgcccaaatatatacaagaggcatcacgagaagaaagcttagcccacttgtgaggtggaacgacaaaacaaccaaacacacatgatatcataccgaggagtatgtaagaaatctcgtctgtga

SEQ ID NO: 1220 - DNA, 90 bp, Lilium asiatic
gtgattctgatttcattggaaaaaattaattttaaaaaaaaaaaaaaaaaaaaaaaagaagaggaaaaaaaaaaaaaaaataaaggggcg

SEQ ID NO: 1221 - DNA, 329 bp, Lilium asiatic
tcgagaccttcaatgtccctgccatgtatgtcgccattcaggctgtcctctccctgtatgccagtggtcgtacaacaggtattgtgctggattctggtgatggtgtcagtcacacagtgccaatctatgagggttatgctcttccgcatgccattctgaggcttgacctcgctggcagggatctgactgacttcctcatgaaaatcctgactgagaggggatacatgttcacaactacagctgaacgggaaattgtccgtgacatcaaggagaagcttgcatatgtggctctggactatgagcaagagctagagacagcaaaaagcagc

SEQ ID NO: 1222 - DNA, 393 bp, Lilium asiatic
  modified_base (354)..(354): a, c, g, t, unknown, or other
atcaagcctacttgaaatggagcgcaatggtgtccttgctctgcttccagtggcgttcacagttgtggccatctttgccatcagcaccattgccactgcagagcagttgcgcagccaacaggacgacaactacgtatgaatcaacaaggggatccagccgtgctgtaaccagtgtggtttctgcacgaagtcctatcctccactgtgcacctgccatgatgagaatcatatctgcccatcctggtgcaagaactgcatgatgtcgccgaagttgatctatccgccgctatacatttgtcaggatctcattgtcaactactgcgatcacaactgtggcttgggaggcggagctgncacatctgagtaactagctgcgactatacgcagcagttt

SEQ ID NO: 1223 - DNA, 293 bp, Lilium asiatic
acgcggacgcgcggggcagcaaagccattttctttttctgaggaaagatgaagcagtacatcggcgtcctcgacaagcccctcagctggggccgccaagaggttagccttagtgcatttgcattcttattttcagaactggtgcaatacaatcagactcaagttgacaacatagcggagctggagcgaagactagaggatgcatgttatgctgttggagcaagagttcttgaacttctttgccttatagaaaatggaaacaggatggagacactactcctgggtttttattct

SEQ ID NO: 1224 - DNA, 422 bp, Lilium asiatic
cccacgcgtccgcccacgcgtccgcggacgcgtgggcagtcagacatttggtgataaaatgagctcttttgagctccagctcgaggcagctcgcagagcaagtgatgttaagaaaatgatcctaggtggagctccgactgccttagttagcttaatcggtcacaagcaataccgtcgttgctctaaagacatctactactttctccagtcttctatctgcctgaaacaacttgcatacgggttgttggaaagcgtgcttgttacagtcttccctgaactgcgtgagctaattctggatattcacgagaaagcatatcgccaagaggtttaacaaaagatataaaaccaagttttgtaagttcttccactctagatggaaactcggaacccaagaatagttaccattgggtcatttcaccctc

SEQ ID NO: 1225 - DNA, 267 bp, Lilium asiatic
ctccttgataacatccgaaacatagaaaggtctgttgagtttgcaaaccgagttgaagaagatgctgtttggagccaagtggccaaagctcagttacgggaagggttggtaagtgatgcaattgagtcatttatccgtgcagatgacgctactcaattcttgtatgttatatgagctgctgaagatgcttacgtataccatgacttgatgaggttcttgttgatggtgaggcaaatgcaaaagagccataggtggatggcgagctca

SEQ ID NO: 1226 - DNA, 223 bp, Lilium asiatic
cacagacctactgccaatcttccgctggactctgggttctaagacatggcgagagaaagggagctggctacctctcaagcgcatcggaacaggctaaaccaggatatctaaaagaaagaacatactgggaccaacgcttgccttccagtggataataagaaacgagccacccccttcccgatcattcaacatgttctacctaatgacatcccgaatcatgctc

SEQ ID NO: 1227 - DNA, 384 bp, Lilium asiatic
  modified_base (335)..(335): a, c, g, t, unknown, or other
tttctctctctgattaaagatgagtttcctgatgtcagactcagtattatcagcaaactggatcaagtgaaccaggtggttggcattgacctgctctcccaatcactgataccagccattgttgagctcgcagaagataaacactggcgagttcggcttgctataattgagtacatccctttgttggcaacccaactgggagtaggattttttgatgacaagcttggcgccctttgcatgcagtggctggaagataaggttttctcaattcgagatgctgctgctaacaacttgaagcggcttgcagaaaaatttggcccagaatgggaaatgcnaaatattatttccgcaaggtccctggagaatgatacaacaaaatcccca

SEQ ID NO: 1228 - DNA, 275 bp, Lilium asiatic
gagaggcactatcaggtaccctattttaaatttccttgtgtacttcaaatggaagtcttatgcatgtaatctgggaagaggtagggccatatgcatctcgtatgtttttgggacacacacaatggcttgttaactacggtctttcgcaacaaggttttagttttggaattggagatacaattgctgatgcattatcaatggagacaatatatgacaccacattataggccataaattatgtctaagaccttatcatgaatgtccactataaggca

SEQ ID NO: 1229 - DNA, 372 bp, Lilium asiatic
  modified_base (286)..(286): a, c, g, t, unknown, or other
aatccccagtcccctctttccctctccaaatacctctgatggcgcccaagtccgagaagaaacccgcggagaagaagccggtggtggagaagcctgccgccgtggaggagaagaaagcggccccagccgagaagaagcccaaggccgggaagaaggtcccggcatccaaggagggggagaagaagaagaagaggtcgaagaagtcggtggagacctacaagatctacatcttcaaggtgctgaagcaggtccaccctgacatcgggatctccagcaaggccatggngatcatgaacagcttcatcaacgacctcttcgagaagatggctcatgagtctgcccgccttggcccgctacaacaaggaagaacac

SEQ ID NO: 1230 - DNA, 394 bp, Lilium asiatic
cggacgcgtggggcagcaaagccatgatcggtgtcggaggaaagatgaagcagtacatcaacgtcctcgacaagcccctcagcaggggccgccaagaggttagccttagtgcatttgcattcttattttcagaactggtgcaatacaatcagactcaagttgacaacatagcggagctggagcgaagactagaggatgcaggttatgctgttggagcaagagttcttgaacttctttgccatagagaaaaggaaacaggagggagacacgactcctggtatcttatcttcgtcacagcacgtgtggaagtgctatttgaaaggtgcagactactgagaaggactgacatgacatagtatatgataggaaaagactttgggatcattatattgtc

SEQ ID NO: 1231 - DNA, 228 bp, Lilium asiatic
catactctattatcaaaactgatgtgtatgtctgcgagttctaacaatgataccagaaaacgcggtcttgaactgggtgccgataagacagacacccatgcagagactaatataattatgagatgagccatataagcggctcttttacctatgatagaagttttgacacaacttcatatagagtgaatacgtccatgatgcggattatactgttataacgacattact

SEQ ID NO: 1232 - DNA, 382 bp, Lilium asiatic
gagagtttctatcaggtaccctatgaaaaatgaccttgtgtacttcaaatggaagtcttattcatgtaatctgggaagaggtagggccagatgcagctcgtaagtttttgggacacacacaatggcttgttaactacgggctttcgcaacaaggttttagtattggaattggagatacaattgctgatgcagcaacaatggagacaataaatgacaccacatcaaaggccaaaaatgatgtcaaagaccttatcatgaaggtccacgaataggcattagaagttgaacctggtcgaactatgatggaattatttgaaaacagaattaaccaggtacatcttctgtggttcttattagctataacaatgatgttagtataagt

SEQ ID NO: 1233 - DNA, 130 bp, Lilium asiatic
gacaccgtctccataacggtggatcgagaagccacatactgatttacttacagtgtcctgtcaaagtactcaacatctaaagagggacataatacaaacgcgacttctaaaagactgtgagaaagatcaa

SEQ ID NO: 1234 - DNA, 366 bp, Lilium asiatic
ccggccggttcagcaacgggtacaacggcatcgattttctcgccattcatatgggctttaggaggagccctccaccttttctttctgttgcaagtaatggaaaccaccaggtaatgaaaggtaaaaaaggtgttagctttgcctctggaggctcaggaattctagactctacggggactaccattacaatgagagagcagatacaacattttgctactattcggttaaatataactgccagaatgacctcagagaaaaccaacttgttgctctctaaatctctattcggcatcagcagtggaggcaatgatatattttcatatgtctctcgaaatggccctttcataatagcgagaaccgaaattc

SEQ ID NO: 1235 - DNA, 92 bp, Lilium asiatic
cattactgccgcctctaggtttttgctctccgaacgatcaaagatgcctctcccgaacgacattgatctgctcaacccgccggccgatctcg

SEQ ID NO: 1236 - DNA, 439 bp, Lilium asiatic
gttcaagtactcttacaaaattgattttgttgaatgtgccacaattggtttcaataacatgtccttgtcctctgagtcaattggaagttttgtgggtggaaaactgttaccagttgaggaaaatagacatcagagccataaatctcctccgagtagactacgagggaattccggtggatttcaaatttaggcaatcttcaaagttgaacagggcacaaattttcctcaagactgaaggttccgtgcacaacctgaacttttatctcactaaactatcaagtagtttgtgtcatttcgagtctctaaccttaaagattagtggtgtttcccaggtgggagatttaccaaaagtttaaagtagggtcacttatctgacacattttgacttgggagtggaattcctggtttttaagatgaccctaattccatttagataccc

SEQ ID NO: 1237 - DNA, 231 bp, Lilium asiatic
ccacgcgtgcgcaggcgctactgctgatatcccgctggactcgatgagcgttggcacggcgaaggagagggagttggcgacctgagaagcggatctgaagaggaaagagcaggatatcagaaggagagaagaagctgtaactaacgctggtgtgccggtggaggagaagaactggcccccgttcttcccaatcattcccatgatttatttaacgagatcccgatacatgct

SEQ ID NO: 1238 - DNA, 204 bp, Lilium asiatic
attcaatactcgacactgccatgcctgcaagtgggttatcaacagagaccaaattatttgcccatggaggtctgcaagatcgtagaaggacaaaggtattcaaaacggttgaacgagaagcaaataactaatttacttaaggttacctgccagcgtcctcaagatcgagaaagggacataatagagaccgtacttcaaaatgac

SEQ ID NO: 1239 - DNA, 444 bp, Lilium asiatic
cttcagtcccaactcgtcagcgatgtcagggcgcggcaagggcggaaaggggctcggaaagggcggagcgaagcggcaccggaaggtcctccgcgacaacatccagggcatcaccaagccggccatccgccgtctggcccgccgtggcggcgtgaagcgcatcagcggcctcatctacgaggagacccggggggtgctgaagatctttctcgagaatgtcatccgcgatgcggtcacctacactgagcatgctcgccggaagacggtcactgccatggacgtcgtctatgcactcaaacgccagggtcgcaccctttacggcttcggcgggtggtctatctatctatctaaggttttcttgttgggattatggatcggaacttgggattttgttactcttgcctttcattctttaatgggatgtaaatcgggttctgttaaaaa

SEQ ID NO: 1240 - DNA, 424 bp, Lilium asiatic
tcggcccaaggctgggaagaaggtcccgtcctcgaagggcaaggagggagagaagaagaagaagaggtcgaagaagtcggtggagacctacaagatctacatcttcaaggtgttgaagcaggtccaccccgacatcgggatctccagcaaggccatggggatcatgaacagcttcatcaacgacctcttcgagaagatggctcatgagtctgctcgtctcgcccgcttcaacaagaagaataccatcaccttccgagagatccagacctcagtccgcctcgtcctccccggcgagctagccaagcatgctgtctcttgagggcaccaaggcggtcaccaaattcaccagtgcttaggggggtgtgtaagaatgatctagcgtatgtacttggtaggtgtgaacttttgattttattaacatgtt

SEQ ID NO: 1241 - DNA, 212 bp, Lilium asiatic
cattactgccgcctctaggtttttgctctccgaacgatcaaagatgcctctcccgaacgacagtgatctgctcaacccgccggccgatctcgagaggaggctgcataagctcaaacgcctcgtgcagtcacccaattcattcttcatggatgtgaagtgccatggatgtttcaacataacgactgcgttcagccactttcagactgttgttg

SEQ ID NO: 1242 - DNA, 149 bp, Lilium asiatic
tgaaaatgttgtaattgaccaaaaaatcaaaaatcttgaaaccctacagccctctgcgcgaactcagccgatcgggcgccgaacctgcttcgccggacttaaccgatcgagatccaagtcggcttcgctacactcggccatgggggatg

SEQ ID NO: 1243 - DNA, 319 bp, Lilium asiatic
cgaattgacgacgcacccacgcgtacgaatccccagtcccctctttccttctccaattacctctgatggcgcccaagtgcgagaagaaacccgcggagaagaagccggtggtggagaagcctgccgccgtggaggagaagaaagcggccccagccgagaagaagcccaaggccgggaagaaggtcccggcatccaaggagggggagaagaagaagaagaggtcgaagaagtcggtggagacctacaagatctacatcttcaaggtgctgaagcaggtccaccctgacatcgggatcttcaacaaggccatggggatcat

SEQ ID NO: 1244 - DNA, 405 bp, Lilium asiatic
atcctcttctccttctatcaagaaagtctttcatcccgtgataaaaatgtgcggaggcagcatccattgttcgccgtggactgatgcaacccagcccagtaaacgaagtaggatggagaggaagaaccagtaccgggggatcaggcataggccgtgggggaagtgggcggcggagatccgtgacccggcgaagggtgcccgtgtctggctcggaaccttcaccactgccgaggatgctgctcgtgcttatgaccgtgaggcacgccggatccgtgggtgcaaggccaagcttaacttttcccacgacgacgaccaggagattaagatgcacgtagcggcagctcatttgaccggcgtggcgccgaggcttgctgaggagctacgtgtgtacgaggtgtgcatggg

SEQ ID NO: 1245 - DNA, 300 bp, Lilium asiatic
cggacgcgtgggataaaaaaaaaaaataaattttattaaaaaaattaaataaataataaatgggtaaagttaaaaaaaaaaaaataataaaataaaataataaattaaaatttttttatataaaaataaaatatatattaataaaaaggggggggccgttcgcgttttaaaaccccccccgtccgttccttttgggcttttgcggttccgattcccaccgaattggttccaaaaaaggaaaaggccccccccccttctttaaacccggccaagtccggggggggcatccaaaaaaagaaa

SEQ ID NO: 1246 - DNA, 393 bp, Lilium asiatic
gaaaaatttgttaagctaggtattgacccttctaaaggagttctatgttacggcccaccgggaaccggcaagacccttcttgctagagctgtagcgaaccgaaccgatgcctgcttcattcgtgtcattggaagtgaacttgttcagaaatatgttggagaaggggctcggatggttcgcgaactgtttcagatggcacgatcgaagaaagcctgtattgcgttctttgatgaagtggatgcaatcggcggtgctcgctttgacgatggcgttggaggtgacaatgaagtgcagcgcactatgcttgagatagtaaatcagcttgatggttttgatgctagaggaaacataaaagttctgatggcgactaataggcctgatactctggaccct

SEQ ID NO: 1247 - DNA, 364 bp, Lilium asiatic
aaaagggggaaaaaaaaaaaaaaaaaaaaagacagaaaaaaaaaaaaaaacaaaaaaaaagaaggaaaaaaaaaaaaaaaaagaaaaaaaaaaaaaagaagaaaaaaaaaggaaaaaaaaaaaaaaggggagcgaaaaaaaaaaaaaaaaagaagggagagaaaaaaaaaaaaaaaagaaagaagaaaaaaaaaaaagaaggaaggcggaaaacaaacaaaaacggaaaaaaaaaagaaaaaaaaaaaaggaaacggaaaaaaaaaaaggaaagaggaaaaaaggggaaaaaaaagaacaaaaaaaaaaagaaaagggaaaaaaaaaaagagaagaagcaccaaaaaaaaaaaaccgggaaaaa

SEQ ID NO: 1248 - DNA, 404 bp, Lilium asiatic
attgttatgaagtttcttggaatggagtggagggactccaaacttctatcgtcccttctgatctggtagaaagtgcttgcccagaaaagatagccgagttcactgagaagaaggctgaagaaaagaaaaaaagtagaagaccaagaccgaggaaatcaaccatgactgctgatgtgactgaagttgatctacaactccaagacctccagctcaacaatgaatcagaaagcaatatctcactcaacaccatcaactatcaacactcagctagtctcaacatcgaatcaccgtgtattttcattgatactgcgactagtcaccacccaactggtctacacaatatcgatcctgagattatcgatctatccacacctttcccgtgtgcattcagagtcgcaaagtcg

SEQ ID NO: 1249 - DNA, 268 bp, Lilium asiatic
gaggttcctgcacttgttccgcctggtgctccttgaagtatgaaaaaaaatggacgtgatgatgataattctgcagaattgggaactctgaacgaggctcttcaagacttacttgatggaatccaggaagacttctatgcagtggtagattgggcatacaaaattgatcctctgcgttgcatatcaatgcatggaattacggagcgctacctatcaggacagaaagccgatgcagcgggatttgtgcgccaactgctagatgacttgg

SEQ ID NO: 1250 - DNA, 230 bp, Lilium asiatic
tcggaagagcaagagctgcatctatactctataaatgacacctcttcaaaccctaggatctccaacacttgaagggagaagcaaaggacagctcctacctgcttgctcaaacattccccttcccggatgatccgcaagactggagccagacaagggaaagatgggtaggggtaagatagacatcaagaggatcgagaacaccaccaacaggcaggtcaccttttgcaagc

SEQ ID NO: 1251 - DNA, 71 bp, Lilium asiatic
cgatcctcttcttccagtccatggacaatccccgaaggcgttggaggtcacgatcaaaggcaagatgatca

SEQ ID NO: 1252 - DNA, 230 bp, Lilium asiatic
gcccttgtcgcgcttctcctccgttctgagtggtttgagcactatcgatgtgatcgcaacttgtcgatggggatgaacctgaacaacatgttgaagatgctccggtgtgccggcaatgatgatattattactattaaggcggatgatggtggcgatactgtcactttcatgtttgagtcggcagaccaagacaagattgccgacttttaaatgaaactcatggacattga

SEQ ID NO: 1253 - DNA, 202 bp, Lilium asiatic
gcagttccggaatgacccactcgacccacgcatccgtggacgcatgcctggtgattgtccgggcgactgttggagttgaaacatacacgcaacatgctgttggaaaaggaagtcttgaatctgatcctgtcgctggttaccacaatgtgcaggcatccgatcgcacatacaggggggagccactgactggtgctgtagctac

SEQ ID NO: 1254 - DNA, 255 bp, Lilium asiatic
cggacgcgtgggttgaaattttaaggctggctgctggagttgaagcaaatacaaatcatcctgttggaaaaggaattctggaagctgctcgtgttgctggttgccacaatgtgaaggcaacagatggaacattcagggaggagccatggtctggtgctgtagctactgttgagagcaagttggttactgttggaacattgaattggcttagaaagaatggggttattgcaaaaccattaccagacacagaacttg

SEQ ID NO: 1255 - DNA, 215 bp, Lilium asiatic
caaacatgaagacagaggggagctcaatcgatgagaagggcacgggccgcatgatctcagcgcttgtcaagaagaggttcaacgccggcgcacatgggaggaaggcacggcgttggattcacgccacctcgacggtcatccagcaactctttttagcttgtcgggcggtgttcaagggccccggaacattcccaacaccgaagggcgaacagttg

SEQ ID NO: 1256 - DNA, 230 bp, Lilium asiatic
agctgatcaagaatccgcgatatgtctttttttgccggccatacacaaagagcgaccccggaattgaaaaactgggccaacaggtgtcacgatcctgtggtggtccaaagacaatcatgatgggatatttgctgctggcatgcctgatcgtaatactaaatttttgaggctgtataaaaagttataacttaattctacaaggggcatgtaatatatattctttggaggat

SEQ ID NO: 1257 - DNA, 262 bp, Lilium asiatic
ccaaaacgttggtccgagtccttcgatctcattcaccgccttcccggcgatcccaaagggtgtggtttagggttcggatggcgtcaaacttgctacaactgcagggaaaggccgaccaggcctcgagtttcgtggctaaacacgggtgcgcgtactacaagcagctcttggagaagaacaaacagtatatcttggatccgccaactgcggagacgtgccaagagctgtcgaaaaagctgttatacactcggcttgctaatat

SEQ ID NO: 1258 - DNA, 135 bp, Lilium asiatic
ttgattacccacctgacggcattcagcacctcttttagcttggcgggcggggttcaagggccccggaacagtcccaacaaccgagggcgtccaattgttgcagctcatgcttgttaaaaggaaacccgaaaattt

SEQ ID NO: 1259 - DNA, 370 bp, Lilium asiatic
agctgatcaagaatccgcgatatgacttttttagccggccattcacaaggtgcgaccccgagattgaaaaactgttccaacaggtgtcacgatcctgtggtggtccaaagacaatagatgatggtatagttgctgctggcatgcctgatggtaatcactaaatcttgaaggctgtatatatatgtagtaacttaattctacaagggggcatgttaatattagattctcttggttgtatattaattactgcgaacatattgtgagatgatatactgtaattatgatagtcatttgatgtacatttgaaacttggcaactgttaaaaagaattgggtcacttgtcttttgtgggttttccccatgttgaatc

SEQ ID NO: 1260 - DNA, 347 bp, Lilium asiatic
  modified_base (59)..(59): a, c, g, t, unknown, or other
  modified_base (64)..(64): a, c, g, t, unknown, or other
cggacgcgtgggtggagaaacatggctgcgaccaggattcaagtaggatgattcgtctngtggngttggtttattgtttttagttcttttttttttttttttatattttttctttcttatttttgtttgtttttatttttttcttttttctttgagtttcttttttgttttttgtttgttttgttttctgttttttttcttttttttgtgtttggtattttgataattttctatttttctttttgttttttggtgttttttgttttaatttttgtgttttttttgttattttattttggatttttttggattttgttgtattttttttttctttagttgtttttgtt

SEQ ID NO: 1261 - DNA, 377 bp, Lilium asiatic
cccacgcgttcgcccacgcgtcctttctattttaaaacaagcgtggtgtcactcgatctcgggaggtgagtaaaccagctccagtagtcctcatggttaccatatatagtccattcaagattaacctgtcttcaaactttctgtgcagggccacaccgtgtgcttatatgtatcggagtctcagcttcaatattacatcggggacacatatgggaaataacaagtcttctattgttaagtatacatgctttatgaataaaattgcttatttatttcttcaaattgctatcttattttttggagtgattttgatagaccaaacttttttgttaaagtcaatatttccttgtgtataatctgtataatcataagcatat

SEQ ID NO: 1262 - DNA, 424 bp, Lilium asiatic
cggacgcgtggggcctttttgagagaaattttgtaaatgttgtagggtttgtttgtctgtataaaaccttgtgagatgggggagggggtggaaaagagtaaaaactgggaagggagggtttagatgcaagagagacagaaaggttgtgctctctcgtagctcgaataataggtcttttgggcttttctttaaagtgagacttcgttcaaagtttggttcttttcttttggcttcaccaaaaagagggtgcttattattaataacttaaactattataatttgggctggaaaaacgaaaaatattccgtaaattgcttttttaaaaatagttaagcgaaggaggaaaaaccaaagttgttcccttagggacacttttccctttcattcctattgaggggaggaatagataatttggtcccttaat

SEQ ID NO: 1263 - DNA, 371 bp, Lilium asiatic
caatgataaacaattaaaaattgaacatgaatgttgtgagaaggttaaagcatggctgcaggatggaaaagatgttcgtcgtggagaatggaaagctgctgaagttgagattttgaatactttccagttactgactgctaaacctgttgtctatctggtaaacatgaatgagaaagactatcagaggaagaagaacaagtttctgccaaagatacatgcttgggtgcaggagcatggtggtgagcctattattcctttcagttgcgttttagaaaagaatctagcagatatgccgtgagatgaagcttgctaatactgtgaggagaacaacgttgcgagtgccctgacaaaaatcataaaaactgggtttg

SEQ ID NO: 1264 - DNA, 111 bp, Lilium asiatic
cggacgcgtggggcctttttcagagaaacttcgtgaatgtaagaagcgattgttctgactgtataaaaccttgtgagatgtgggaggttggtggaaaagagtaaaaactgg

SEQ ID NO: 1265 - DNA, 295 bp, Lilium asiatic
tcgattttatgaggcataagacaaactccatgaaacatcttatatcacactagccacatgacaaaacacatgctcaatatgtgacgcatggaaggaacattcaatgttcacatctaacaatagtcacggatcctcattcttcatcaaaatccatgacttgcttaatattacaagcccggttttaagttatcacgtgagtgatgtgatttcaagtgcctttgttcgggtgaataaaatgcgtctaatcaaatacccaccagtgtatgatgatttaataaatgttggaattattcaa

SEQ ID NO: 1266 - DNA, 409 bp, Lilium asiatic
cggacgcgtgggcggacgcgtgggtttcgctgcgcgtgcagcagcttgatgttcgttgtgaaacaaaaaccaaggacaatgtgtttgtcactgttgttgcatctatccaataccgtgcccttggtgagaaggcagctgatgctttctataagcttagcaacacaaagggacaaattcagtcctatgttttcgatgttatccgggctagtgtgccaaagctcaacttagatgatgtcttcgagcagaagaacgatattgcaaaagctgtggaagacgagcttgagaaggccatgtcaacctacggatatgagatagtccaaactcttattgtggatatcgagcctgatgtgcatgttaagagagcaatgaacgagattaatgcagctgctaagatgaggttggctgcaag

SEQ ID NO: 1267 - DNA, 264 bp, Lilium asiatic
cccacgcgtccggggagaccctctatagtatcatgtttggaccggatatttgcgtgtacaggaccaagaaggttcatgccattcttacacgcaatggtgtaaatcacttgctcaagaaagacgacccatgtgaaacggtccaactaactcatgtctacaccttcatgatgcgtgcagatgctacttataacatacttgttgataacactgtgaagcatacaggaagcatatacagtgaattggatattatttcttcaaagaaaa

SEQ ID NO: 1268 - DNA, 56 bp, Lilium asiatic
gtgaataagaatacggcgaaagcagtcaagattgcttcgcgaacaacctactctga

SEQ ID NO: 1269 - DNA, 325 bp, Lilium asiatic
cccacgcgtccgcccacgcgtccgcataagttgactagctaagtgatcccggagacgaaagactgggtgggggaggcgatcgtgagcccggtgaatgatcagggacactgtgggtcttgttggacctttatgggagcctgtgagtgtgtatacgtgctcaccactggggctttggaagctgcttacaaacaggcaactgggaagtccgtttcactatctgagcagcagctggtagactgtgcctacgcattcaataacttctgatgcaatggtgggttgccgttccaagccttttaatacattaaattcaatggtggccttgaca

SEQ ID NO: 1270 - DNA, 440 bp, Lilium asiatic
tgaagctgctggatttcaagagggcgatgagataacgttggatactctgacaaagaaaggcctgatcaatccatctggtagagaaagaaagctacctttgaagattttgggcgagggggatttgacggtaaagttgaacataaaggcgagatccttttcagcagcagcaaaagagaagcttgaggctgctgggtgcactctaaccgtactttctggtcggaagaaatgggtaaaaccatcagttgcgaaaaacatggctcgtgcagatgagtacttcggcaaaaaaagagcaactggtggtgcggcaacagcttaatttgggtctggatgaaacatattttctctcatttcctaacgttctgtaccaagaaagtgaaagtgaaagtgatggtcaagattggaaggtgtaagaatgttttcacggctttggggttgatatt

SEQ ID NO: 1271 - DNA, 422 bp, Lilium asiatic
cggacgcgtgggccggaatgcggcaagggacctgctgacgctggacgagaagaatccccgtcggatctttgagggcgaggcgctcctccgccggatgaacaggtacgggctccttgaggaggggcagaacaagctcgattatgtactcgccctcaccgtcgagaactttctcgagcgtcgcctccagacccaggtcttcaagtccggcatggcgaagtccattcatcatgctcgggttctcatccgtcaacgccataataaggtggggcgtcaggggggtaatatcccttcattcatggggaggggtgattccccgaaacacattgactttggttttaacaatcctcttggaaggggtggtcctggaaaggtgaaaaagaagaaccttaagtctggcaccaagaagggcacttattgtgatt

SEQ ID NO: 1272 - DNA, 106 bp, Lilium asiatic
gtctaataatagataccgagcaaaagcagttcaaaagatttgctggcggaggaacaaatcctaccacgaggactgtctaagacgggtgggcaacaccaaggatcaa

SEQ ID NO: 1273 - DNA, 422 bp, Lilium asiatic
ggccgcgacgcactccgggcaccgtcacaaacggcgaggagaagacccggcaccaggaggtgggccacaagtcgttcctccagagcgacgcgctataccagtacatactcgagacgagcgtgtatcctcgcgagccaccggcgatgaaggagctccgcgacattaccggcaaacacccgtggaatctaatgacgacgtcggctgatgagggccagttcttgagcatgcttctcaagctcatcggagcaaagaacactatggagatcggcgtgtacaccggctactcgctggtagccaccgcactggcgctggccgaggacggcaagatacttgccatggacgtgaatcgtgagaactacgaactcggcctgccagtcattcagaaagccggagtagcccacaagatcgactttcgtgaggga

SEQ ID NO: 1274 - DNA, 121 bp, Lilium asiatic
tcgtagacgcgtggggcgccgacaacactggtgctaagaatctctacatcattttggtcaaggggatcaaggggcgcctgaatcgccttacatctgatgtgtggcaacatgggatgctact

SEQ ID NO: 1275 - DNA, 255 bp, Lilium asiatic
gcgtgcgcggacgcgtgggccggaatgcggcaagggactcgctgtctctggacgagaagaatccccgggggatctttgagggcgaggcgctccttcgccggatgaacaggtacgggctccttgaggaggggcagaacaagctcgattatgtactcgccctcaccgtcgagaactttctcgagcgtcgccttcagacccaggtctttaagtccggcatggcgaagtccattcatcatgctcgggttctcattcggc

SEQ ID NO: 1276 - DNA, 318 bp, Lilium asiatic
cactctttctttcgattttaaaacaagcgtatagtcactagatctcatgaggtgattaaaccatctccactagtcctcataaataccaaatatagtccattcaatattaacctgtctccaaacttcctgttcaagtccacaccgtctgcttatatgtatctgaatgctagctttaatattacaattggacacataatgtaaatatcaagtcttctattgtaatattaatctgtagaataaaatgtatattatttttcaatttgatattcttatttttttggtagataatttatatttagtaccaaaatattttttttt

SEQ ID NO: 1277 - DNA, 348 bp, Lilium asiatic
gtttgtggagagaccaagtggaatcgcattttatattattttcgatattgaaagagggccgcaggctggtgagtttattaaggatgcctctgaaaaaaaacctcctttaaagcccccgggtattgttttgaaaggttttttgccacaaccagaggtggatgagggttttttaaggggaattggtttctatgcaccttttgctatgtttataaccaaccttcacaagtattggggtaaacaagatttacaacttccttctcaacctattgaacacaatctgggaattttttttgtcaaattcttttaagtttattggcgcaaggtgaacactacaaaagtttgtgtggt

SEQ ID NO: 1278 - DNA, 117 bp, Lilium asiatic
gtagtttgtctgggacaaggaccttgccaataagatcttgtgctttggccctgaaacaactggccctgatatggttgtggatatgtttaagggagtccagttccttaattaaatcaa

SEQ ID NO: 1279 - DNA, 247 bp, Lilium asiatic
  modified_base (233)..(233): a, c, g, t, unknown, or other
gttacttcacctgcaaaagaaacaggcacatctaaggtgcaaaagaagcccgatcagcagaagcaggcggttaagaagatgctggctgtcaagcagacgtcggcttttaagccgaatcaggcagttcagaactctttaaagtgtgatgtctgcaatctgcaatgcaacagccagttcatgctgaactctcacctcaatgggaaaaaacatctgatccagctcatgcgacgcancaaggcacaaggcg

SEQ ID NO: 1280 - DNA, 312 bp, Lilium asiatic
gtttgtggagagacgaagtggaatcgcatttgatattagtttcgatattgaaagtgggccgcaggctgctgagtttattaaggatgccttgaagaagatacctcctttaaggcccctgtgtatggttttgaaggtttttctgcaacaacgagagttgaatgaggtattttcagggggaattggttcctatgcacttcttgctatgttaaatagcaacctttaaatgtatcggagtagacaagatttacagctacgtcagcaacctatggaacacaatctgggaattcttttgggcaaattctttgagtttta

SEQ ID NO: 1281 - DNA, 306 bp, Lilium asiatic
ccggggttatcgctggtggggcagtaaggattgtactggaaatggctggcgtggagaatgctcttggtaagcagatacgaagcaagaatgccctcaacaacgcaagagccaccatcatggctgtccggaaaatgaggcagttcagtgatgttgctcgtgagcgcggaattccaatggaagaactgtggaagtgattgtctttgcctgctgattctccatctgtatgtcttgttttcgattcccttttatctttccgttccattggcaagaatgcgaaccttctcttgtaaattttcccttctagtc

SEQ ID NO: 1282 - DNA, 182 bp, Lilium asiatic
  modified_base (41)..(41): a, c, g, t, unknown, or other
gtttgtggagagacgaaatgtgaacgcatttttttttttantcgttatagaaaggggcccgcagcctggttaatttattaaggtggctttgaaaaaaaaacctcctttaaggcccctggtattgtttttaaaggtttttttccaccaccagaggtggatgggggttttttctgggggaatgg

SEQ ID NO: 1283 - DNA, 324 bp, Lilium asiatic
gtttgtggagagacgaagtggaatcgcatttgatattattttcgatattgaaagtgggccgcaggcttgctgagttattaaggatgccttgaaaaagataccctctttatggcccctggtatgggtttgaaggtttttttgaacaaccagagttgaatgagggttttttcagggggaattgggtcctatgcaccttttggtatgttaataacaaacctttctatttttctgggtttaaaaaatttaaagtttcctctgcaaccttttgaacacaatctgggaattttttttggcaaattttttttagttttttggccgcaagtt

SEQ ID NO: 1284 - DNA, 358 bp, Lilium asiatic
cggacgcgtgggcggacgcgtgtttaattttttacctaaaccctattttaccacctaaaaaaaacctaatgttccctaccacctaaaaaacctattttccacacctaatgttccctaccacctaaaaaacctatttttcaacctacatgttccctaccctctaaaaaacctattttccaacctacatgttccctaccccctaaaaaaaacataatttacaccctaactggtttctaaccttttaatcttcccttcccacctttatatataattacctaacctccaaaattaaattaaaaaaattattttaccttccctttcattaaccattaattctattaaagccctttggattaat

SEQ ID NO: 1285 - DNA, 142 bp, Lilium asiatic
cccacgcgtccagggaaacgccttgcggttctgatctgtttccactaacatccgtctgtttcttctctgagggcatcacattcatccttctaccacaaggaggtgaataaccactttgctgcatcctacttgcctgaccttc

SEQ ID NO: 1286 - DNA, 373 bp, Lilium asiatic
cagaaagatcctgtcacaaacgagatggttctcgaaggaggagcactggtgctggcggatatggggatatgtgccattgatgagtttgacaagatggaagaatctgatagaactgcaatacatgaagtgatggagcaacagactgtcagtattgctaaggccggtattactacatctctcaatgcaagaactgctgttcttgctgctgctaatcctgcctggggacggtatgatcttctgaggactccagctgaaaatataaacctccctccggctcttttatcacgttttgacctgttatggctaattctggatcgtgctgacatggacagtgacctttgaatggcaaggcatgttgtccatgtgcaccaac

SEQ ID NO: 1287 - DNA, 77 bp, Lilium asiatic
cggacgcgtgggcggacgcgtgggcgcactttgcaaggtttccacgagactggagacaagattttacggatcgaggg

SEQ ID NO: 1288 - DNA, 255 bp, Lilium asiatic
tgaggaggtgaagaatctcgattaaaagattgctgatgctgaagagaactttgtcgaaagttaagtgcgtgaagctcatctagctaaatctttgttctacatcaagataggtgacaaggagaaggccctggagcaattgaaagttacagaaggttaaacacttgctgttggtcaaaagatggatttggtgttttacactctacaacttggatttttctatattggactttgatctcatctccaaatctatagata

SEQ ID NO: 1289 - DNA, 130 bp, Lilium asiatic
ctgacgcgtgggagctgactgagtgttgaatctgagtatgcagtaaatgtcgtggagcacatttatgatagccatggtgtattttaatacaactgctctaacaccatacctctaacagttcttggaaaat

SEQ ID NO: 1290 - DNA, 246 bp, Lilium asiatic
aaaaaaaaaaaaagaaaaaaaaaaagggagaggaggaaaaagaaagggagaaataaaataaaagaaagaaaaaaaaagaaaagaggaaaagaaaaaaaaaaagaaagaagaagagaaaaaggaaaaaaaaaaaaaaaaaaaaaaaaaaaaaaaaaaaaaaaaaaggagagagaagaaaaaaaggaaaagaaagaaagaaaaaaagaaaaaagagaaagaaagaaaaaaaaaaaaagaagagaaaaa

SEQ ID NO: 1291 - DNA, 255 bp, Lilium asiatic
agaagaggcccctacaagtgcccccgaggactcatcatcggccagcccttccacgtccccgtcggaggctgaggctgcagtatcgcccgatagtagcagcggtggtggtgccacctcgaaagagccttccgccagcgaggctggtgccgcagaggagccgtcgacggccgaggccggcggcgcatcggccgacagcccgcctgagccgacccacacttcttcggactcgccagcggaagtctcctggcccggccg

SEQ ID NO: 1292 - DNA, 211 bp, Lilium asiatic
cggacgcgtgggagctgactgaggctgaaactgagtatgcagtaaatgtcgtgaagcacatttatgatagccatgttgtatttcaatacaactgcacaaacaccatacccgaacagcttttggaaaatgttactgtatttgttgacgcttccgaagccgaggaattcacagaaattgcatcaaaacctttaagagccctaccgtatgattc

SEQ ID NO: 1293 - DNA, 404 bp, Lilium asiatic
cggacgcgtggggtttcttcctcaccatcgctccggtccagttcggtttagggtttgcttggaacgtctttgggggaggagatgtcttcggatggaaaaatccctgagaaggaatcgggcggcgagcttgaaaatcatggtcgcttgtggggttcactagatgagactataaaggaaaatgcatccgtagtgggttcatctttgactgattgcaaacatggcttaaaaaaccttgacagtgaagagggctcaactgagaaagacaatgagaaatctaatgggagtagagggcaccagattcgttcttttggtgacattggcaattcttctatgaaaaatgagaaaaaacttacaacaagatattttatcataaagagcttgaaccataacaatatttaattgtc

SEQ ID NO: 1294 - DNA, 255 bp, Lilium asiatic
gtggaagagtcttggagatgacggaaaagaaactagtttgtctagtgcttggtatgaattgttgtcagttgttcacatgatggccatgttgtttttattgcaagcaaacctcatcctcatccccaaggcctcagatgaggatgagagaatggtatctgaagattccaaacaagatgctgctgttttacttgattaaggcatttgggtgcttggattattgcgttcactatatactggtctattaacccttataaa

SEQ ID NO: 1295 - DNA, 276 bp, Lilium asiatic
ccggaatgcccgtcgccacgcctccgggactctagagcgtctctcttctcgtctcctacttccaaggctacgcaaggatggtgtgagtcagtgtcttgaacgacgctctcatgagcatgtacaatgctgataagcggggaaagcgccatgtcatgattaggccttcatcgaaagtcataatcaagttcctcctggttatgcaaaagcattggatcattggggacgtcgaatatgttgatgaccacacacttggttagattgggggggaacttaatg

SEQ ID NO: 1296 - DNA, 256 bp, Lilium asiatic
gttgcgggttgcatcagcagaagcttgtgcagctgcattgattcaagcagcagaggccgttgcttccagtgatttggaagctggagaagcaacctctgatgctggaattctaatctttgccccatcacattatgataaaaaaggtgccttcgaaaccgatgaagacgtgtttgaatggatagcgggtgtattaagtggcccaagaaaccagtgctttagacactgacatgtttgacgtcaaggactcgtggcatga

SEQ ID NO: 1297 - DNA, 122 bp, Lilium asiatic
ggagctccttaaatataaaagaccataggaatcttacattagagattcacgggtccagaggggtgtcagtgagcgagcacaagggctacagcacactagagggagctgtgcaatcttatggg

SEQ ID NO: 1298 - DNA, 419 bp, Lilium asiatic
cggacgcgtgggatctaaaactctatattaacctcataacacagatccatggttccagaaaaaattcatcgaaccagcacaaaagaaacagaacactagaattcacaatagaatctagtggggtccaacgatatttcaactatctccgcacaagatcaagtcattactggtgcttggactcaactggtcgatctgcctggtgaccaacctcacttttctttttcggaagttccttcttgggcttggggcccctcttaatatcggcttcctcttcttcttcatcatccttctcaacggcatcaatttcggcctcggcctcttcattaatatcttcaagaatattacccccttcaaaggcgacaagggcatcattctgagcagcctcttcagtgaaccatgaaacaacatgagggatgatc

SEQ ID NO: 1299 - DNA, 146 bp, Lilium asiatic
ttgcatttttttcacgcactataagctgcggctttcagggatttttaagctggagaaacaacctctgatgctggaattctaatcttgccacaatcacattatgataaaaagggtgcctccgaagccgatgaaaactattttgaatt

SEQ ID NO: 1300 - DNA, 179 bp, Lilium asiatic
ggagtttctcaaatatctctgatctccgatttcttccatttgtttctaacatgttttttgggctgattttaggagagcataagtactggaacacgaggaggaagctgtgcattcttatagctatggattggaatagagcgagcagtaaagatacataggtcttatagctagactttctt

SEQ ID NO: 1301 - DNA, 127 bp, Lilium asiatic
ctgaagcttaaaagcgaccttatgatcatatatcacattatcgaacggtcctatatgaaatgaacatggcggcctactttaagagacaggctctggctccccaataatattattccgaatctaagaa

SEQ ID NO: 1302 - DNA, 104 bp, Lilium asiatic
gcagttcctaaaatatctatgctctacgatttgtcccatttgattctaacaaggaaattggggtgactgtaggagagcatacggactggaacactaggtggaaa

SEQ ID NO: 1303 - DNA, 230 bp, Lilium asiatic
cccacgcgtccggagtggaagaggcgatcatttcggctaccctccggagcttgaagatcaagactggcgcctgcaagcgcgtgctcaaggagctccgctcctacgagaaggaggtcgagatggaggcctccaagacggccgacatgaaggagaagggcgccgatccttacgaccttaagcaacaggagaatgttctggcagagccgaggatgatgattccttgatgccac

SEQ ID NO: 1304 - DNA, 160 bp, Lilium asiatic
acgtgaccacctgcaaactggggccattttgctttttatatgcaacaacctggctatgtgtatgtgctacctgaagcttatcctagcccttcaccacattataacatgtctcacacaccttatcggggctatccttaccaaccttcttctggaggatatg

SEQ ID NO: 1305 - DNA, 293 bp, Lilium asiatic
aaaccatccaagctctccgatccaagccctcggttcgagcaggacaagttgcacaaggtttcaataatcacttacaaggactcaattcacatcgtttctcaacagcaaaagaggatgaggagagagagaaacttgccaaggagatgggcaaagactggagttctatttttgaacggagtatcaatactttatttttgactgaattgggccggggactaaatcttaccctcaagtacttttttgggccaaaaggtacctataaatatccctttggaaaagggccaattgacccc

SEQ ID NO: 1306 - DNA, 132 bp, Lilium asiatic
cggacgcgtgggctgaggcccatctcttcattggcgatctggccggggcgaagaaagaggaggtcaatgtcgatgtggaggacggccgccttcttaatatcaacggtgaacggaggagggagcccgacgaga

SEQ ID NO: 1307 - DNA, 302 bp, Lilium asiatic
gttataccaactcaaaaaaactatgtattgaaggtgggagtaatggtggccttctagttgcagcctgcataaatcagcgacccgacttatttgggtgggctcttgctcatgttggagtcatggacatgctgcggttccacaagtttaccataggtcattgctggacctcagattatggttgttcagataatgaagaagaattccactggcttatcaaatactcgccactccataacgttcaaaggccgtgggagaaatatgttggtcagccttgtcagtacccaccaaccatgctcttgaca

SEQ ID NO: 1308 - DNA, 173 bp, Lilium asiatic
tcaatgcggatcccgaggatactaaacccgatggctatgacgatattcccaaggaaattactgatactgatgctaagaagccggcagactggcatgatgaaaaagatggtgaatggacagcaccaaccatccctaatactgactacaagggcccctggacccacaagaaaatt

SEQ ID NO: 1309 - DNA, 177 bp, Lilium asiatic
cggacgcgtgggctgaggcccatctcttcatttccgatctgcccggggtgaagaaagaggaggtcaaggtccaggtggaggaccgccgcgttctcaagatcaccggcgagcggaggagggagcacgaggagaagaccgacacctggcaccgcgtggagcgcagcagcggtcaatttg

SEQ ID NO: 1310 - DNA, 355 bp, Lilium asiatic
gggacgcgtggggagctcctgatgttatattgggactcggttggagctttccgtgtgatatttggagtttgggctgtatccttgttgagctttgttcgggagaagcattatttcagacccatgagaacttggagcatttggctatgatggagcgagtactgtgtcctttgcctcaacatatgttgagaaaagctgatcgacatgctgataagtatattagaagaggccgattgaactgtcctgaacgtgccacttggagagacagcatcatagctggtactaagttaccctgcctgaaaaacttggtgaggaagaatgttaatcactttgttgaggatttaattgacttttaaca

SEQ ID NO: 1311 - DNA, 384 bp, Lilium asiatic
cggacgcgtggggaagccataaaaaaccacgactttgcatcttttgcgcagttgacctgtgcagacagtaaccagttccatgcagtctgcttagacactaggcccccaatattttacatgaatgatacatctcacaggataatcaatcttgtggaaagatggaaccaacacgaaggaacaccacaggtagcctacacatttgatgccgggccaaatgctgttctaattgcgccaaaccggaaggttgctactcttcttcttcaaaggttgctcttttacttccctccaccgccagaaaatgatttgaccagctacattttaggggacagatcaattttgcatgaagctggagtacaatcgccgaaagatgtcgaggctttggta

SEQ ID NO: 1312 - DNA, 201 bp, Lilium asiatic
cggacgcgtgggcttcttttttccacgcgttcggacatgcattattctttgcttattcgagaactgacatgtcatatgtgtgagcatgctgtttgataagccggctgtcgctgcatctactttcagcacagattgagcttgatctgcccacaaactaaaaacaagttggtgtgaacagtggttgctttgattctccaacag

SEQ ID NO: 1313 - DNA, 424 bp, Lilium asiatic
ctttagggttttggttctcctccaacctctctcaagatgaagctcgtcaggtttttgatgaaactgaacaatgagaccgtctcgatcgagctcaagaacgggacggttgttcatggcaccatcacaggtgtggatatcagtatgaatacccatttgaagactgtgaagctcacagtgaaagggaagaatcctgttactctcgatcaccttagcgtgcgtggtaacaacattcgatactatatcctccccgacagcttaaatctggagactttactggttgaggaaacacctagggtcaagccgaagaagccgactgcagggagagcaatgggccgtgggcggtgccgtgggcgtggacgcggtcgtggccgtgggcgttgatgtgtgccacctgcatcttaacttttggtctgtgtcatctttt

SEQ ID NO: 1314 - DNA, 402 bp, Lilium asiatic
  modified_base (357)..(357): a, c, g, t, unknown, or other
tcgtcctcgagttcgcagctcgcggcgagctgtataagctcctccgaaaactccatcacttctccgagcagcgtgccgccacgtatgttgcgagccttgcggcggcgctggcttattgccatgggaggaatgtgattcaccgggatatcaagccggagaacctgttgctcgatgttgagggacggctgaaaattgccgactttggatgggccgtgcagtcgaatgctaagagacacaccatgtgtggtacgatcgattaccttgcaccagaaatggtagagaaaaaagagcatgattattctgtcgataattggactttaggcattctttgctatgagtttctctatggtgtacctncatttgaagcggaggaccagtatgatacattcagaaagataatga

SEQ ID NO: 1315 - DNA, 428 bp, Lilium asiatic
ctctgctctaatgacgagcagctctcctcctccagcttccttcgacgccaagtcttcccacttccctgagagcaaacgacgacaaggacgacgacaaggacgtccacttctacctcctctcctccccaagaagcttcctttgatggcgacctcccaagaagcttccaccgtcaacctcattacctgaaggcgacctcctctacgacagcaagcttccttcatctccaaggcgacctgagagtgacatgcagagatgttgactgcagagaagtcctccaccgtctgcatgcatcaccagtgaactccagaagactcgagaggatgaaccagagccgtcaatccaatcaaggtaagatttacttcgatttagtactaattcttgtctcttattatagaaattgtggatctataaaagatcgggaagatca

SEQ ID NO: 1316 - DNA, 432 bp, Lilium asiatic
aatccatcctcaccttctgtgatcctcgccacggcggggtatgatcacaccatcaggttctgggaggcgaagagcgggcggtgctatcgcacccttcagtaccctgattcgcaagttaacaggcttgagataactcctgacaagcaatacctggctgcagctggaaatcctcacatccgtctttttgatgttaattcaaatagcccacaacctgttattagctatgactcacatactagtaatgttatggcggtgggatttcaatgtgatggcaattggatgtattcaggttctgaagatggcactgtaaaaatatgggacttgaggtatgataaactgcctgccttcccatcgcattatttgagacatttcataatccctggtttttgtaaggtaaaaaagttacttttagtttctgcagtgcaacatgat

SEQ ID NO: 1317 - DNA, 276 bp, Lilium asiatic
aattccaggcccgcgccacgcgtcccaatccatcctaaccttctgcgatcctcgctttggcggggtatgatcacaccatggggatgggggatgctaagagcgggcggagctatctcacccttcaataccctgcttcgcaagttaacaggcttgagataactcctgacaagcaatacctggctgcagatggaaatcatcacatccctctttttgacgttaattcaaatagttccacaacctgttattagctatgactcacatactaataatgttatg

SEQ ID NO: 1318 - DNA, 417 bp, Lilium asiatic
  modified_base (294)..(294): a, c, g, t, unknown, or other
cggacgcgtgggtgaacctttcatctgaatcaccgatatgaaagtaattacttgaagatcttcgaagctaacgataaaaaataagcacaaatataatagagagaagaagcacacaatcacaatactaagatcttacatgattcacccctcttgggctatgttcttaaccccacaataatcaactagacttacaatgaaagaagaagtttaaaagaggaaacctagatatctacaatatataaccctcaactctctaattatattcttttgatatgtggataattactatgattntggtgattatgggtggtaatttacaatgaacgcttatggattaattatcccaatccattccttactcaccaaagaccttgacttgtactccaaagattcttgaatgctaaaaaactttacttt

SEQ ID NO: 1319 - DNA, 333 bp, Lilium asiatic
ccgacgcgtgggctcgcactgaatgacgacttgactgacatccttccggcgacacctcaggccttggcttatgaaatgcgcttggagaaccgctttaaaaccgcatatcaagcttcaaaacatggttaccaagaggggcaccttgctgttgcacaaggtgacgcggattgggatcgggaggcccttaatcacggcatatcgcgtgctgattatgctagctattatacgggttaactaaaggatcaaataggccagcaaaataatctggtgtacaatactgagctctatgctagcctgatgcagagcgccatgccagaggacgagacctagaaa

SEQ ID NO: 1320 - DNA, 342 bp, Lilium asiatic
cttcaaagttgtatacagaaggtatgccagcctttacttctgcatgtgtatcgacgcaagtgacaatgaactggaggtccttgagattatacatcatctagttgagatattggatcgttactttggcagcgtctgtgagctcgatctgattttcaattttcacaaggcatactatatactggatgagattctgattgctggtgagctccaggagtcgagcaagaagactgtggccagactcatagctgctcaggattccttggtggaaacagccaaagagcaagctagctcgatcagcaatatgattgcacaggctaccgaatagaaactattactattact

SEQ ID NO: 1321 - DNA, 388 bp, Lilium asiatic
cattattcgaggaacaaatggtgtgggccgccccggactcatatccatgggcgtgttacatgtatcaagtccagagtgaggctctccaatttgttgccctgagacaactaaaggaggagactgattggaagcctatgagggtttccgacgatcgactgcaacagttatcggaaggttcgggagataaaaagtgaagttgtggaaatgagaagagaaacttgtagccgtagatacccctatataaatgaatccatagtttccttgtcagttcgtcgagaaagtaaatatgagagattgtgagtttcaagctgattttgataaagttttctaagaataatgtaatgtatgacaggttgtgtgtataaaaatctgaaacaatgaggtttga

SEQ ID NO: 1322 - DNA, 393 bp, Lilium asiatic
atccccaattccgagagctgaagcgatggataccgccaagacgaccaagggcgctgctggccggaagggcggcgcaaggaagaaggccgtcccgaaatccaccaaggccggtctccagttccccgtgggtcgcatcggccgctacctcaagaagggccgctactcccatcgcgtaggctccggagctcccgtctatctcgccgccgtccttgagtaccttgctgccgaggtgctggagctggccgggaatgcggcgaaggacaacaagaagtcccgcatcatcccgaggcatctgtgcctggccgtgaggaacgacgatgagttcagcaagctgctggcaggggtcaccatctcccattgcggcgttctttccaacatcaaccctgttcttgc

SEQ ID NO: 1323 - DNA, 413 bp, Lilium asiatic
  modified_base (371)..(371): a, c, g, t, unknown, or other
gctgtgtcctcgacttcgctgcagatcctactgatacctttgtgggggttattgccatggatgatactgatgagatgttttcttctgccaggctctttgagataggaaggcggcggcccactgatgatgattctgaccctgatgacggtgttgacacagatgaagacgatgatgatgaggacaatgatgagtcagatactgatgtgaacactctcttgggaactgatatcagcggtgatgttgattctgatgccatcagtaacgaggatgatgaagatgacagcggggatgacattgaagaagatgcagacttcaatattgatgatgcagattctgagggagggcagggattcgttgagatcatggctganggggaagatggtgaggatgatgacagtgagctgctggagtca

SEQ ID NO: 1324 - DNA, 438 bp, Lilium asiatic
aagatgggaaagctaaaaagaagaattcgcccacgagatattacgattaatatagggaagggcgtaccaattccagaatgtcctatacccggtgaaagctggaaagaagttagacacgacaatacagtcacatggctagcatattggaatgatccaatcaatcaaaaagagttaaagtatgtgttcctggctgcaagtagctctttaaaagggcaaagtgataaggagaagtatgagaaggctcgcctactgaaggaatacattcataacattcgggtaaattataccaaggatttctctagcaaagatcctacaaagcgacagatttctgtggccacttacctcattgataaacttgcgcttagggcaggcaatgaaaaggatgacgatgaagctgatactgttggttgttgtactttgaaagtggagaatgttatg

SEQ ID NO: 1325 - DNA, 423 bp, Lilium asiatic
cgcctgtgttcctgctggatctgctttccattccgctccccgatgtgtcagagctgctgagagacttgttcgggtcgcctcatgtgctgaagctagggtttaggttcaagcaggatctcgcttatctctcgtcgacattctccaacaagggctgccccggctttgatcgggtggagccatttcttgatattaccagcatttactaccgactaaaagatcagaaagatggcaaaacgttaccaaaggacaccaaaagtttagcatctatatgtaaagaaatgctcgacattaccctatcaaaggaactccaatgtagtgattggtcatgccggccacttactgaagaacagttattatatgctgcagcagatgcatattacttgctccgaatattttctgttttcgaatgcaagtttctaaact

SEQ ID NO: 1326 - DNA, 437 bp, Lilium asiatic
ttctcctcccgtgccgccgggactgctgctccgatgggcaaggagatcccactcgctgccgatgccggcatggacgccgtccagcgccgcctcatgtttgaagacgagtgcattttggtggatgagcatgatgctgttgttgggcatgattcgaagtataactgccatttaatggaaaagatagaatctgagaatctgctccatagggcttttagtgtgtttctgttcaattctaactatgagttgctactccagcaaagatctgcaacaaaggtgacatttcctttggtatggacgaacacctgctgcagtcatcctctttatcgtgattctgaactcatagaagaaagctttctaggggtaaggaatgctgcacaaaggaagttactagatgaactgggcatacctgctgatgatgtaccggtcgatgagttcac

SEQ ID NO: 1327 - DNA, 267 bp, Lilium asiatic
atagacaagacatgtgtatttttaccaggtctgtgtgctgattaaaccagcgaaatctaatatcaaaatctgctatggctggactaaaatctgcatgggaatattagaaggcaatcagatgaagtagatccgttgccatgtttagtgcgcttgcatggcaagtcataatataatttaagagttctacccttcttatgtcagatgtgcttgatgctgtgttttccatttagttacatgatgatgccactacactttttttgggaggaa

SEQ ID NO: 1328 - DNA, 406 bp, Lilium asiatic
ctcaaacatcgagtttttgaggtttccttggcggacctccaaaatgatgaggatcaggcatacaggaagatccgactgagagctgaggatgtccaggggaagaatgttcttaccaacttttggggtatgaatttcactactgacaaggtgaggtctttggtccgtaagtggcaaactctcattgaggctcatgtggatgtgaagactacagataactacactctccgcatgttctgtattggattcaccaagagacgtcctaatcaagttaagcggacttgctatgcgcagtccagccaaattagacaaattcgccgcaagatgactgagatcatgatataccaggcgacttcttgtgatctgaaggaagttgttcaaaaaggtcattcctgaaatgatcgggaaa

SEQ ID NO: 1329 - DNA, 438 bp, Lilium asiatic
caagaggttgattatgttgcatgggtgtgcgatcaggatgcctatgcctgtagtggtcaaaagtgctctgccgagtcaattctttttatgcacgagaactgggcatcaactaatcttctacctctaatgcaacaacttgctgagagaaggaaactggaagatttaactatcggtcctgttctgacagttacgacagatgccatgatggagcacattgctaaattgcttgaaattccaggatcgaagcttctctttgggggcagacccttggaaaatcattcaattccaaaaatttatggtgctatgaaaccaacagctgtttttgttccgcttgaagaaatgctcaatggggacaactttgagcttgtaacaaaggaaatttttggccccttccagattgttaccagttacaagcaagaccagcttggcatggtgttg

SEQ ID NO: 1330 - DNA, 380 bp, Lilium asiatic
gttttgtcgatcttgatacaccgcttcttctatctgatgatccggtagttggaggttatgaagtttctggtgctgtctacaagttcacaggcgcagcaggtcatggtggatttcttcagtgggacaatattgcctgaatcagtatttaattccatgggttgagagaccatttgaagacttattatcaccttcgttgttccattcaataatgatgtcaaggcctccaaatatcttcctgttaataaatgaaactgagcagaaggtacttcggagaatttcacttgtttgtacgtagttttctctaatctgttagattttgtgaaaattttcttgcatgctactgtggtaatcaataagcaaatgggttaatgttacaatgg

SEQ ID NO: 1331 - DNA, 172 bp, Lilium asiatic
gttttgtccatcttgatacaccccttcttttatattatgatcccgtactctgaggttatggaatttctcttgctatctacaagtttacaggctcaagaggttatggtggacttttttagcgggacaatattgcctgatgcagtatttaaatccatgggttgggagacctttt

SEQ ID NO: 1332 - DNA, 329 bp, Lilium asiatic
gaagaggagaagaatgctctagccaagaatctagctgcgttatctgaagaactggctatagaaagggatcgtgtccttcggatcagtgctgactttgataactttaggaaacggactgagagagaccgaaagtctctaatgacgaatgtccaaggggaagttgtggagagcttgttgcctgttttggataattttgaaagagccaagactcatatcaaggtggagactgagggagaagagaagataaataacagttaccagagcttttacaaacagttttcggagattcttacctcattgggggtagaggcagtggagactgttggcca

SEQ ID NO: 1333 - DNA, 417 bp, Lilium asiatic
cgcgtaccacagaaatgagctgtcatgcttgttaagaaaagaactcgacagaggtgggactggagtgctcttaccacaaagtccttcgacaggtttacgacttcgttgcaaactctgatcacaagccttatattatgtatcggacttggacaccgtcacactttgagaatggtgagtggttcagcgggggcatctgcaaccggacagtgccataccatcaaggggagttcaatggtacagtactcgaacggctgatgccgagcatcaagctggaggagatcgaccaggcgggtgtcaatgtaccggagaatggagctcaggtgaaacttctttgcacccttaatcttttactgtttagacctgacggacacttaagttcttttaggacttttcattcctttttcaggagagcattgc

SEQ ID NO: 1334 - DNA, 414 bp, Lilium asiatic
tcggccacgcgttcgaccacgcgtccggatgcacgaggtgacccgcgtgcttggaagtgtgatcccgcctcccgccccaaagcagatgcagcaactgcctgggatgcaaccgacccctccatcgaccatcagttacatcgaccagtatgccaacctcaagacctacaatgccttgacctgcactggttcgatgagcacatcggacacccagctgtttctgaagttcggagaggtcatctcacagacaactgactgatatcaagatgttggagatggcttgtctggtccattccgatattgttaggccaagaagggtaattcagacaggctttcgcgtcattgggtgctgtaagctgtagcagcaacggatcagatttgtgtatattggtgggaactccgggagggagcaaagtc

SEQ ID NO: 1335 - DNA, 262 bp, Lilium asiatic
cggccggaattccggtcgccccgccttcggaatttttttattgatttatagacaagacacggtgtattttaacaaggtctgtgtggtgattaaaccagcgaaatctaatatcaaaatctgctatggctggactaaaatctgcatgggaatattagaaggcaatcagatgaagtagatccgttgccacgtttagggcgcttgcatggcaagtcataatataattttaagagttctacccttcatatggcagatgtgcttgatg

SEQ ID NO: 1336 - DNA, 421 bp, Lilium asiatic
gaacaacacagtaatcggctgtcatgcttgtcaagaaaagaacttgacagaggtgggactggagtactcttaccacaaagtccttcgacagttttacgacttcgttgcaaactctgatcacaagccttatattatgtatcggacttggacaccgtcacactttgagaatggtgagtggttcagcgggggcatctgcaaccggacagtgccataccatcaaggggagttcaatggaacagtactcgaccgtctgatgcggagcatcgagctggaggagttcgaccaggcggctgtcaatgtaccggagaatggagctcagctgaaactccttgacaccttcaatctttcactgctcagacctgacggacactcaggtccttataggacttttcatcctttcgacagaggagcagtgcagtag

SEQ ID NO: 1337 - DNA, 328 bp, Lilium asiatic
ccccggagtttcaaggcgtttgcgtctcttttgaaagtttataagccggcaaatgggttggatcatggacatgttgatggggacacgaaggatgctcaatccgttggtcatgcaagcggaaagatgaattcaaatggagatgataggagaaatgcaaccaacgtccatcatcctgagggtgtagaggttgaacctggagtgcgtggaccaaaacgatcatggatttatttgcatacccgtacttgcgctgcacattcatgctcagatgctaagactagtcatatacaattttgaaacgtacatgtttccgatcaaagggatgtgacct

SEQ ID NO: 1338 - DNA, 444 bp, Lilium asiatic
cgcctgtgttcctgctggatctgctttccattccgctccccgatgtgtcagagctgctgagagacttgttcgtgtcgcctcatgtgctgaagctagggtttaggttcaagcaggatctcgcttatctctcgtcgacattttccaacaagggctgccccggctttgatcgggtggagccatttcttgatattaccagcatttactaccgactaaaagatcagaaagatggcaaaaagttaccaaaggacaccaaaagtttagcatctatatgtaaagaaatgctcgacattaccctatcaaaggaactccaatgtagtgattggtcatgccggccacttactgaagaacagttattatatgctgcagcagatgcatattacttgctccgaatattttctgttttcgaatgcaagtttctaactgaaggcaaatgggtgtctaatt

SEQ ID NO: 1339 - DNA, 254 bp, Lilium asiatic
cggacgcgtgggtgcttcttcccgctctccctcctccgcaagcggcgatcgatccaagatgaagttcaacatcgcgaatcccaccactgggtgccagaagaagctcgagatcgatgatgactcgaagcttcgggctttttatgacaagcgtatctcccaggaagtcaatggtgatgctctaggagaggagttcaagggatatgttttcaaaatcatgggaggatgtgacaagcaaggcttcccaatgaagcagg

SEQ ID NO: 1340 - DNA, 427 bp, Lilium asiatic
gttagaatattagttatttaggattccattattttagatagagaatcagtttgttagttatttagaaagagactttatgtattatttagataaggatgtaagtagtagtgtttatctcttgttatgtttttaggtctgaccagtttattcatgaattaagcatagaaaagtttccagcaaaacatatggggagtccactctctcgaagcagtccaataggaggcacgtctcccccgaaggaccgtttatcttgctcatcttcttcattactgtttgtaggttattaggattttactatttggtaccacagtgatggtgattgcaggttattataattctactatttggtattagagcaatgacgaccagtggtccaccacgcgaacatagaaacgcctttccaaggtgaagacgatgtccacgagct

SEQ ID NO: 1341 - DNA, 298 bp, Lilium asiatic
  modified_base (259)..(259): a, c, g, t, unknown, or other
cgcacgcgttcgtgcttcatccccctctccttcctcttcaagcggcgaccgatccaagaggaaactgaacatcgtcaatcccaccactgagtgccagaagaagcttgagatcgaagatcactcatagcttcgggccttctatgacaagcgtctctaccaggaagtcaatggtgacgctctacgagaggagttcaagggatatgctttcaaaatcatgggaagatgtgacaagcaaggctccccaaagaagcaaggtgtncttactcctggccgagagagacttttgctacacagaaga

SEQ ID NO: 1342 - DNA, 432 bp, Lilium asiatic
ttttccttttcgaagttattgtgcttgttcgctaatttcttatgtatttgttttcagtgagcttctagcaatcagatttgtgcatttttccttgttcagcataaatgtgctctgcatgtcttcccaatcttcatttttgtgagattgtttgtgctattggatataattatttaccttaatgaattttgtaccttttcaattttatacataaagatggatcggctttatggttggaaatcttgcccaaatgctcctatagggaaggctttaaaacaacaatgtagagatgtgataaatgagtacaataggaggcttgctcagggcttgaatacggccttttattacaataataaatagatgctggagccatcaaatagtgtccctttttcggataaaacatttaatattgttcccacaagcgctcctagtggt

SEQ ID NO: 1343 - DNA, 317 bp, Lilium asiatic
ctttcttctaaatttatcaattcctccaaattggaaaccctaattagctccgatggcccggacgaagcagaccgcccgcaagtccacttgccggcagggcccttgcaaggcggttggcacccaaggttgttggtaggtcggaaccaacaaccggcggagtgaagaagcccaatcgttacaggcccggcacggtggcgctccgtgagatccggaagtaccagaggagcacggagcttctaatcaggaagctgccgttccaggctgtggagagagatatcgcacaagattataagacggatctgcgtttagagagccat

SEQ ID NO: 1344 - DNA, 218 bp, Lilium asiatic
cagcctgaagaattgcatcctaactgtaccgtatgcgaccgactcgaagtttctgaggcaccaagagaatcaactgagattagcaacacgaatgtgatagtaattgattctgctgacagttcagactccagtcaccagtcctatgagctaccagaaccatccgggactgctatgtcacgtttgtgcaagatatgtatgacatgtgaagatgatgatag

SEQ ID NO: 1345 - DNA, 355 bp, Lilium asiatic
cccacgcgtccgcggacgcgtgggagtggttatgtggcgcagctccaattacggctatggggacggtgaggcgatggtcacgtggtcctgcatctactccagttggaaagccggcagtccatcctgcttctgtcgacttgaaaggaaaagcatatgagttgctgagacatagtggttcaagtttcttgatggatgatatataccgaaaccctggtccacttcagttcgaagggcctggtgctgatgctaagagtattacgttgtgtgttgaagatcaggattacatggggcgaattaagttgctccaggaatacctggataaggtgaagaacattgtaaagccaggattgtcgca

SEQ ID NO: 1346 - DNA, 415 bp, Lilium asiatic
cccacgcgtccgcggacgcgtgggagtggttatgtggcgcagctccaattacggctatgatgacggtgaggcgatggtcacgtggtcctgcatctactccagttggaaagccggcagtccatcctgcttctgtcgacttgaaaggaaaagcatatgagttgctgagacatagtggttcaagtttcttgatggatgatatataccgaaaccctggtccacttcagttcgaagggcctggtgctgatgctaagagtattacgttgcgtgttgaagatcaggattacatggggcgaattaagttgctccaggaatacctggataaggtgaagaacattgtaaagccaggatgttcgcaagaggttctgaaagcagctctgagttccatggctttcgtgatcgatgtgctcactttatt

SEQ ID NO: 1347 - DNA, 437 bp, Lilium asiatic
atcacaatggcagctgtgtatctgatagacttcttgaagagcatgagctcaattcttggtttgatccccagtttgggggagtgaacaaagaagcgagaaccgtgaatttagcaattcaggaagccctggctggcacggaaatccagttgctcaacctcacttacatgagcgagttccgtgctgacgcccatccagctatctggctcggcaaggaggacgcggtggctgtctatggacaggactgcatgcattggtgcctgcccggcgtgccggacacttgggtcgacatcttggctgcacagatcatgcatcacttcaagcaggagaaaggctgatcacaatttctttaaatctgtagttttgcgataactacaacaactgggctagaactttttagatttgattttttgggtaacataaacaacattaaatagttt

SEQ ID NO: 1348 - DNA, 220 bp, Lilium asiatic
aaacagaacatctttttaagattaagtatacctgatgttcccctttcttactatactgggcttcttggcatgcctggtttaaccgcttatgctggaatttatgaaatttgtaagccaaaggaaggggaatatgtcttcatatcagctgcatcaggtgccggtggccaacttggtgggcaatttgctaagcaaattggctgttatgtggtcggcagagctt

SEQ ID NO: 1349 - DNA, 398 bp, Lilium asiatic
cagaaaaaaattgaagcagctattcaacagaaaggtattgatgagaactgggaagctgcactagagtacaacccagaagggtttgcacgcgtggttatgctatatgttgacatggaagttaatggggtgcctctgaaggcatttgttgacagcggagcacaatctacaattatatcaaaaagttgtgctgaacgttgtgggttattgaggctccttgataaacgctatagaggcgttgctattggggttggtcagtctgagatcttgggccgaattcatgtagcaccaatcaagattggccatctcttttaccattgctccttcactgtattggatgctcccaacatggaattcctcttcgggcttgatatgctgcggaagcatcagtgtataattga

SEQ ID NO: 1350 - DNA, 418 bp, Lilium asiatic
cggacgcgtggggaagatgattacagctccaatactcggcctcctcgccatcatcggggggctgactccatctatcttggcgaatccctatcgcaattctctcaagtccggggaaagtctaaaagccttcgaagctctgagctacaagaacttccttttcataatgcaaccaaactgcaacctcgtcctctaccatgattccaccgcagtgtggtcgaccaagaccggcggccaagattacggttgttacgccacattgcacaacggcggcaacctggtcgtctacagccccaacgccatacccctgtggcagagcggcaacggaaccacaggaggggaatatgttattcttcttcaaaagaacggagatgccgtcatcttcggcactgctaaatggtgggtggtatggcctacattg

SEQ ID NO: 1351 - DNA, 380 bp, Lilium asiatic
atcagatggtattcttcatcttgaacgcggtcgaggtcacaggattgctcttgaccttcaaaccatttctgatgccgcccaaaataccaactaactagtgaatgttcaaagcataaagggaaaagtacgtttgtgtcggttgaaattgatcttcatgtcatcggagctgaagcttagtagaagaaaactctggcaattcctcttcgatttttgtatgatttcaatttctttgaggtcgtttgcagcttgatgactgtcttttataaacatgttaatggctatatgactgtttagatctatatgtactcaataaacatggtaatggttatatggccatttagatataaatgtactcaagattgaatggttttgctgctctt

SEQ ID NO: 1352 - DNA, 187 bp, Lilium asiatic
gcaaaagaacaaatggtaaagaataaattgaacgcggttgacgccacaggaaagccctgggggtgcgggccatttctgatgcaacccaaaataccaaataactagagaatgttcagagcataaaggggaaagaacgtgtgatatcagggaaataaatcttcatgagatcaaatctgtagcttagtag

SEQ ID NO: 1353 - DNA, 328 bp, Lilium asiatic
  modified_base (51)..(52): a, c, g, t, unknown, or other
cggaaacccgggacgacccacgcggccgcagaaaaaaaaagaagcagctanncaacatttttggtttgatgagaactgggaagctggggtagagtacaacctaaaagggtgtgcacgcatggtaatgctatatgttgacatggaagttaatggggtgcctttgaaggcatttgttgacagcggagcacaatttacaattatattaaaaagatgtgctgaacgttgtgggttattgaggctccttgataaacgctataaaggcgttgcttattgggtgtggacagtctgagatctttgggcctaattcatgtatcaccaatttaatatt

SEQ ID NO: 1354 - DNA, 298 bp, Lilium asiatic
gcgcacaattctccgagctctttcgtttctctctaaggtcctctatggccgctgtagagacagcccccgccgttacaattgagcctccgcctgttgagtctaccttggtggaggggccagccacatcagatgtccctccggtgaagctggccaaggtgaaggccacgaaggctcccaaggaaaggaaggccgtgacgaagaagccggccctacatcctacctatctcgagatgatccgcgaggcgatagcgtccctcaaggagcgaaccgggtcaagccagtacgcgatctcaaagtt

SEQ ID NO: 1355 - DNA, 437 bp, Lilium asiatic
ggagagaggagagagaagagagaagatgtcgtggcagacctacgttgatgagcacctgatgtgcgagatcgacggccagatcctcaccgccgccgccatcgtcggccacgacggcagcgtctgggctcagagcgagaacttcccgcagatcaagcctgaggaaatagctggcattatcaaggactttgaagaaccaggttctcttgcgccaactggtctatacattggcagtacaaagtacatggtgatccaaggtgaaccgggggctgttattcgagggaaaaagggttctgggggtgttactatcaagaagactaatctggctctcgtcatcggtatctatgatgaaccaatgacacctggacagtgcaacatgattgtcgagaggcttggcgactatctcattgaacaaagttattaaggttgcacatgctcta

SEQ ID NO: 1356 - DNA, 379 bp, Lilium asiatic
cggacgcgtgggcggacgcgtggggttccggagaatatatcttacacaaccctatcggaggtgcttgtttagcctccatctcgacggatctaatataggatgtgatgaggaggcgacgctgatagagatgcttcaagattcactatttagcctagttggtatctatcaataccggcactagtgtaaacatatttactactttctctagacttctatatgcctgaaacaactcacatacttgttcttcgatacgcctgctgatactaatgtctctgacctggaaacatactcttttgcagactcttctgataccatggcctctgaccgataaacagactctattatagattcagtagaggcattactagtctatgactat

SEQ ID NO: 1357 - DNA, 322 bp, Lilium asiatic
ccggccggttcagcaacgggtacaacggcatcgattttcttggcattcatatgggctttaggaggagccctgcaccttttgtttctggtgcaagtaatggaaaccaccatgtgatgaacggtaaaaaaggtgttagctttgcctctggaggctcaagaattctatactctacggggactaccattacaatgagagagcagatacaacattttgctactattcggttaaatataactgccagaatgacctcagagaataccaacgctgatgctctcttaatctatattcgacatcagcagaggaagcaatgatatattttcat

SEQ ID NO: 1358 - DNA, 344 bp, Lilium asiatic
cccacgcgtgcgcacacgcttgcactgacgcttgggctggaagaccttctcgaggtgaatgagccacggttgagccccgaatgagcggcagccttactcagcacgtgatgttaccattatgatcctactactcgctacgactggcggaatgagctcattatgacacatgcagtcccgtgctggctgtaacgacatctactacatattccaggcgtctctgtcactgattcagctctcttacgaatcatgcggcatcagaacaggacagtctgccctgaactgcgctgactaattctgtatagtcgctagagaccatattcaccgtatgtgtatcacaacatgct

SEQ ID NO: 1359 - DNA, 377 bp, Lilium asiatic
gtgcagtgggaagaggaaagatggggtggtttgcggtatgatcgtaaatagacgtaaaggggtatattgcaagtaccacacaccgaacacatctcagaaatattctactatgcgcgctgagctcaagggtgggaacatacgaatgtcgagggctcaaccagagggggtacacatatttgatcctatgacggacagaacaaataccgtgaagtcctcgcagcgggttacagtactgtctgtggatggactcaagaaggctttaagtaaatcagacaaggtgactacaaattcccactcacagggagtgaggtttcttactcatgtcacagctagcatggaacctaaagtcccaagtaaagggtctgcaaagctggatc

SEQ ID NO: 1360 - DNA, 394 bp, Lilium asiatic
gcatctccggcgataaggcgtacttcttcttatgcggattctacggggcgcaggacacactctgcgatgatgctggtcggcattacttcaaagactgctacattgagggttctatagacttcatatttggtaatggcagatcactctacaagaattgcttgctgcactcaattgccaaccggttcggctcaattgcggctcaagaccggaactcaccgtgtgaacgcaccggcttttcgtttgtgggctgcagagtgacgggctcgggcaacctgtacgtgggtcgggccatgggacagtattcgaggattatctttgcctacacttactttgaggatgttgttgcagctggtggatgggacgactggggccaacccggggacaaagacaagac

SEQ ID NO: 1361 - DNA, 408 bp, Lilium asiatic
cggacgcgtgggcgccaccagaggagagagaatctcaaaccctaatcgaagaaatcaagaagtagaggcgatctatccatctgtcccgttagatctgcactctcggctggatctctaaatgtctgagaacattgagacatcttccgcaacacgttgaaattagattcctgtaggatggcttctgtgagtgtggtcccttcttcaatattgaagaacagcagtggtactagcgttggcatggacaaattgcccgaggagatgaatgatatgagaataagagatgacaaggatatggaagcaactgtggttgatgggaatgggactgagacaggccatatcattgtgactaccatcgggggtagaaatgggcagcctaaacagacaataagctacatggctgagcggact

SEQ ID NO: 1362 - DNA, 412 bp, Lilium asiatic
  modified_base (54)..(54): a, c, g, t, unknown, or other
tcggcatattcggcgataaggcgactacttctttgctgtctctacggggcgcangacacacggtgcggtgatgctggtcgggattacttcaaagactgctacattgagggttctatagacttcatatttggtaatggcagatcactctacaagaattgcttgctgcactcaattgccaaccggttcggctcaattgcggctcaagaccggaactcaccgtgtgaacgcaccggctttttgtttgtgggctgcagagtgacgggctcgggcaacctgtacgtggagtgggccatgggacagtattccaggattatcttttcctacacttactttgaggatgttgttgcaactggtggatgggaccactggggccaacccggtgcaaggacatgacagtgtttttttgggttaa

SEQ ID NO: 1363 - DNA, 430 bp, Lilium asiatic
gtcttgcttgctgctatctctccatggatctcgtctccccctccgaccacctctgctacgttcgttgcacctactgcaacactgttcttgcggttggagtaccatgcaagcgattgatggatactgtgacagtgaagtgtggtcactgcaaccatatctccttcatcaaccctagacctttggttcagccactcaccccagaccaacacataaattttcagggccactgcaatgactgtaggaagcatctgccaacgtcacaaatgcctacatcttcatctacatccagtgaacaaatgatcccaaaggccccgtttgttgtcaagcctcctgagaagaaacacaggcttccgtctgcttacaatcgcttcatgaaggaggaaatacagcgaatcaaagctgccaagcccgacattcctcatcgagaagc

SEQ ID NO: 1364 - DNA, 424 bp, Lilium asiatic
  modified_base (354)..(354): a, c, g, t, unknown, or other
  modified_base (393)..(393): a, c, g, t, unknown, or other
  modified_base (408)..(409): a, c, g, t, unknown, or other
  modified_base (419)..(419): a, c, g, t, unknown, or other
atgaggcattcttcgcttggaaagatgacccaacgaactttgagacgtatctcaaagaattacgagttcagaaggttttatcgcaacttttggatcttggagaatcagcatctgatttacaagctttgcctcaaggccttgcagctcttctctcgaagatggaaccttcgagccgaggacagttggttgaagagctcagacaagtacttggctaagtgtgctgtttcgtttggaagcgatgtatgatgtcgataatcaagtgccttttttgttgttactgtagcagatgtagatacatggtaatgttgagggggagatttagaaagttttttagataatagttgactgggaatnttatttctaatgtaaattgtttacttttcgtacataatntattccgtcttaatnntatttagatnttact

SEQ ID NO: 1365 - DNA, 436 bp, Lilium asiatic
cgcaccggctcgatcttgaaagctggcacggactccatcatcagcatcgaccttttcgaccgggatggcaacggcatcggaatccccaacctggaggcgtggggcgggttgatgggagctgattacaactacttcgagaggggcaatctcgacatcttcagcggccggggaccctgcctgtctttgacgccatgctccatcaatgtcacctccgacggcaccggggcataccatggttggtactgcaactacatcgaactcacagtgacgggtccgcatctcccttgtgatcagcagctgtttacgattgatcagtggctagctactgatgcgtcgccatacaagctgtttgcggcggtagatgtctgccctcccgctgaggacatcgctgtcgccggagctggaggtggaggccatggctggcgtggtctgcccg

SEQ ID NO: 1366 - DNA, 223 bp, Lilium asiatic
  modified_base (10)..(11): a, c, g, t, unknown, or other
  modified_base (22)..(22): a, c, g, t, unknown, or other
  modified_base (38)..(39): a, c, g, t, unknown, or other
  modified_base (79)..(79): a, c, g, t, unknown, or other
  modified_base (81)..(81): a, c, g, t, unknown, or other
  modified_base (85)..(85): a, c, g, t, unknown, or other
ggcggccggnncagcaacgggnacaacggcatcgaacnnctcgccacacataagggccaggggaggagcgcgccacccnancgcncccgcgcaagcaaaggaaaccaccagggaacgaaaggcaaaaaagggcggagcagcgcccccggaggcccaggaatgctagactctacggggactaccagcacaatgagagagcacatacaacattcttgctactatg

SEQ ID NO: 1367 - DNA, 387 bp, Lilium asiatic
ggaaaaccaattggtcaagttggccgaggaaggaaaggcattggagctggaggttaagaggaaggaaatgaagtcactgtcagtgcaccgacaaccgtctcgtgtgattcgcagtggcaatcaagtgggggtgcatggtctcacagattcagtgaggagcccgcggcgacataacttgtaagttgtagtctggcgaagaaattatagtcttttgcatgttgttacttgtgaatttcctaaccttttttttaagtaccgaggatggtagggaagaatgtagtaacttgtaagttggtagtctggctaagaaattagagtcattcgcacgttgttactcgtgaatttcctactttttgttttagtactgagtatgttaaggaagaatgt

SEQ ID NO: 1368 - DNA, 231 bp, Lilium asiatic
cacggcgcttctgctgatatcccgctggattctatgatcgatggtatggcgaaagaaagggagctggctacctgtgaagcggatctgaagatgtgaaagcattattttttatggagagaagaagctgttacttacgctggtgttccggtggatgataagaactggccctcgttcttgccgatcattcaacatgttatagctaaggagatcccgatccatgcttataggctg

SEQ ID NO: 1369 - DNA, 431 bp, Lilium asiatic
gttcaagtactcttacaaaattgattttgtggaatgtgccacaattggtttcaataacatctccttgtcctctgagtcaattggaagttttgtgggtggaaaactgttaccagttgaggaaaatagacatcagagccataaatctcctccgagtagactacgagggaattccggtggatttcaaatttaggcaatctccaaagttgaacagggcacaaattttcctcaagactgaaggttccgtgcacaacctgaacttttatctcactaaactatcaagtagtttgtgtcatctcgagtctctaaccttaaagattagtggtgtttcccaggtgggagatttaccaaaagtttcaagtaggttcacttatctgacacatttggactgggagtggaatcctggttttaagatgagccttatccatctagat

SEQ ID NO: 1370 - DNA, 394 bp, Lilium asiatic
attctgctctggagtctgaaagcaggatcacacttcgcgtgctgctccgcttcggaccctctctcgccgccgatactcgtctccggtgataccaccgatcgtgaactcccggtactgatagtgttgaaaggattctagctcactagttttgagttgctacacttgttggaattggttgttgaaggtactgactgttgataggattctagctcactggatctgaattgtgacgcctgttggaatgagtgaaccaaacgtgaaggttacctacacaaccagcccagggcttcttgaggatcaagctgcggagacgattcctaagggtaagggttctgaggagatgacctcagagaaaatgaaagactcctgagaaagaacggatgaagaggaacat

SEQ ID NO: 1371 - DNA, 203 bp, Lilium asiatic
  modified_base (11)..(11): a, c, g, t, unknown, or other
cccatgcgttngagtacgcaaggacggattttcatgtataaccgatcacacatctacgggttctggaggccgacattcggatcatattataaaacctaacttgaattaaccaaaattattatatcaatatgctttcaaagtcttcaataaccattgatatacaactttctttaaacagttaaacctaccaactaataaaacta

SEQ ID NO: 1372 - DNA, 429 bp, Lilium asiatic
tttgatttcaattagttctgttggctagaaattgtagatctgatgaagaaaagatatctttgaggccggttaatctcttttttatggcagtatgagtaacatctcggaggatatatcgggaatagtatttgtaccgcttttttttcaatttttgttgaaattcttgtataagcttggaatgatgagatgcactgggctctgagagaagctgctgcttactcaaattgattgatatgcacttgcctagaaagcattggctgaccttgcttactcactatattttctaatctgttatgtatttctactaatcttgtagatctagttgttattgatagtgtcagtgtaggttgcatgtttagagagtgaattttgattatttttttatttcgacgagggcgaattttccggcggaaatagctctggcttcac

SEQ ID NO: 1373 - DNA, 425 bp, Lilium asiatic
  modified_base (254)..(254): a, c, g, t, unknown, or other
gtcggcctgttgatgtgcgcgagcaagggatccagactccacagatctacgagtcccggaggctgacttctggaccagtttgtaaaaaggggcacgccccgatccaactcctggatatcaatttccctccaagggctccaagatccactgctctacagctgcctcttaaacagtcgatcccgtcaccgaataaaactatcgctgtagaatctaaatgtagaaacccatcaagcgaagattcctgtgcggcctgngatatatcacaagcaaaccatgaggttcatccagttggttcctgccaagggaactgtttcagtgaagcgcagtccagttcatctccactggaggcttcggagttacgggatgatgtcgatgagttcagcagcggtgagcagaccatgtattctgctgaaactatggagagc

SEQ ID NO: 1374 - DNA, 373 bp, Lilium asiatic
ctccttgataacatccgaaacatagaaagggctgtagagtttgcaaaccgtgttgaagaagatgctgtttggagccaagtggccaaagctcagttacgggaagggttggtaagtgatgcaattgagtcatttatccgtgcagatgacgctactcaattcttggatgttatttgagctgctgaagatgctaacgtataccatgacttggtgaggtacttgttgatggtgaggcaaaggcaaaagagccaaaggtggatggtgagctcatttttgcatatgccaagattgatagactaggagacattgaaaaattcgttctcatgccaaatgttgcgaattttaaaaatgttggtgatcgattatatgatgacac

SEQ ID NO: 1375 - DNA, 352 bp, Lilium asiatic
gttcatcccttatcttatgtggtaaagcatttgctgatactaaagttacaaaagatgctctcgctgctttggctgctcccatagtatctgcaaggggaggccttcctgtttctgcaagggttcttgcatctggtgattctgcgattttgttatttgcgtcggaagataccattaaaaactgcccggatatacaaaagtctcttgtgtccgatgatagtggtgtaattctttcttcggatggcgttacaccctactttcaggccaaagactccccgaagatagatctgctaaaaaagcctgcttctgttatctttgtgtctgctgacagtaccggtgttctgccttcggtatc

SEQ ID NO: 1376 - DNA, 116 bp, Lilium asiatic
ggaggagaaagggatgtccgccgaagtaaatacttacttatcgctaatccactggcattgggtaacatggaaagtctaaggtgcccaacccctccccaatattatttattcttttt

SEQ ID NO: 1377 - DNA, 236 bp, Lilium asiatic
  modified_base (156)..(156): a, c, g, t, unknown, or other
  modified_base (182)..(182): a, c, g, t, unknown, or other
  modified_base (187)..(187): a, c, g, t, unknown, or other
ctctctcactcgctcgccgtctccaagggtcacctgagatcacattagcaaatggggaaggctgttgttgtgctcaccagcagcgagggcgtggctggcactgtgtcctttgtccaagaaagcgatggtccgacgacggtgaatgggactctgtcncggctgaagccccgccctcatggttntcatngtcacgcccctggggataccaccaatggctgcatgtctactgggccaca

SEQ ID NO: 1378 - DNA, 435 bp, Lilium asiatic
cccacgcgtccgaaactattataaataaactttgtatattattttttatgcatattatcactaccgtaagataataatataatattacgtctggctgaagacgtaaaacaaatgcttcttgggagacaacctaagcttatatatatatagatttttgttaccttatatcatcaccctgaaaattgaaccgttctccgatattctttgttctctttcaagcattgaggacaatgctcatttcaagtttgggggtggtgtatgtactatacacctttttgcgtctggctgaagatgttaaattcaacgcttttgggaggcaacccaagttaaataaaagaaatcaatgaccataatttttttttcagttacaatttaaatttagtataaaactttatttactatggagaaatgtcggtttcagtttttttgatttct

SEQ ID NO: 1379 - DNA, 311 bp, Lilium asiatic
ctcatacctgcgatccccgctccgcactcgattcccatggcgacctcgggcaagaagcgatggcttgctctcgaagcaaacccggacgtgatgaatcagtttgtgtggggattgggggtgccggaggacggagtggagtttaacgatgtgtatgggcttgatgaggagatgctggagatggtgcctaagccggtgctggcggtgctgtttctttacccgtacacctcaccgagttcgtcggagatggaaatagagcaagcgcaaagcttggaggccgaaaagaagaaccctactagtgagaaggtgttttt

SEQ ID NO: 1380 - DNA, 291 bp, Lilium asiatic
aaaaaaaaaaaagagcaagagaacaagcaccatctacaagacacgggaaaaggacagaaccgggaaaaaataaaaaaaaaggaaggggcaaaagaaaccaaaaaaaaaacagagctgacatgcatacggagacagggacaagaaccatgagccgaaagaaaaaactccacaggagggcaacaaaaaaaaaagatcaggggctgcatataaaaaacggggggagcagaaaaaaacaggtgggaacacaacaaaatgggccagaagaaaaaaccactttgggaggagggggat

SEQ ID NO: 1381 - DNA, 404 bp, Lilium asiatic
  modified_base (275)..(275): a, c, g, t, unknown, or other
  modified_base (284)..(284): a, c, g, t, unknown, or other
gcttccactgcgcgaactctctgatcgccatggcctcggagaagaagctgtccaatccgatgcgggagataaaggtccagaagctcgtcctcaacatctccgtcggcgagagcggcgatcgcctcaccagggcctctaaggttttggagcagctgagtggacagacgccggtgttctcgaaggcgaggtacactgttcgatcttttgggatcaggcgtaatgagaagattgcgtgctatgttactgtgaggggggagaaggctatgcagcttttngggaaagcncatggggttttgggggggggggggcggaaggtgaaggagtatgagttgctgaggaggaacttcagtgatactgcttgcgtttgggtttggaatccaggagcatattgatcttggcattaa

SEQ ID NO: 1382 - DNA, 168 bp, Lilium asiatic
cactgatgttgagggggaactcaagggagctttcaagggttttgacaaggaccagaactgcttcatttctgctgctgagctccctcatgtgatgactaacctccgagagaagcttactgatgaggaagttgatgagatgatacctgaggctgacatggatggcgatgg

SEQ ID NO: 1383 - DNA, 339 bp, Lilium asiatic
aagattggagaccttaaaggactatttggcttgttcatggtccaagtgcaacttcttcgagcaaaactcaaagttttggatgtttcatatggaactgcaacagctaatacagctctgacataccatcacggtaaacttctggctctgtcggagggagataaaccttatgttgtcaaagttctagaagatggggacttgcaaactctaggattgttggattatgacaagaggttggcacacaacttcactgctcatcccaaggttgacccattcactgatgagatgtttacatttggttattcacactcacctccctattgcacttatcgggtcataact

SEQ ID NO: 1384 - DNA, 345 bp, Lilium asiatic
atgctgagttggtaaaagaagaagattgggacgttctgctgaagatgtaagaagaatatatcgagaacatctgtgtgcagatattgaagttcaaacctgacttggttataactgaaaaaggtcttagcgatcttgcatgccattacttcagcaaggctggagtgagtgctatcaggagggtgagaaagaccgacaacaaccgtattgcaaaggcttgtggtgcggtgattgtcaacaggccagaggaattgcaagagtccgatgttggaaccggggcagggttttttgaggtgaagaaattcgcggatgagtttttctcattcatcgttgactgcaaagatccaa

SEQ ID NO: 1385 - DNA, 367 bp, Lilium asiatic
gttttctgagcttaagtgggcttattatacagaaccatctactgccagccatagattttatgtttctccatccggactgctttgttgatgttgtgctactgtcgactgttgcaactattagccagttctttatttcgtacactataaggacatttggggctcttacatttgctaccataatgaccactagacagttggtgagcatcttgctgtcatgtgtgtggttcagacacccccttagttgggaacaaggcatcggagctgttgttgtctttggttctctttataccaagagcttattgaggagcaaagatcaaaaactacccataccatctagtaatggattgaacggtttgaataaagattc

SEQ ID NO: 1386 - DNA, 292 bp, Lilium asiatic
gatcgatttcccggagtttctgaatctgatggcacgcaagatgaaggacactgattctgaggaggaactcaaggaagctttcaaggtttttgacaaggaccagaacggcttcatttctgctgctgagctccgtcatgtgatgactaacctcggagagaagctgactgatgaggaagttgatgagatgatacgggaggctgacatggatggcgatgggcaggtgaactatgaagagtttgtgaggatgatgctggcaaagtgagtggcagcatcttccctccatgggaaaagc

SEQ ID NO: 1387 - DNA, 235 bp, Lilium asiatic
acggatctattttcccgaggttgtgtatctgatggtacgcatcatgaaggacactgattgtgaggaggaactcaaggaagctttcaaggattttgacaaggaccaaaacggcttcatttatgctgctgagctccttcctgtgaggactaacctcgtagagaagctgtctgatgagcgtacttgatgatacgatacgccaggctgacatggatggctatggtcaggtgaactatga

SEQ ID NO: 1388 - DNA, 439 bp, Lilium asiatic
caagaaacctttgagcttgtctcaggcaccacctccaagacatgggaaaggcttgatcctggttcgactgtgtccctttcgtttgtttttgagaccaaagtgaagcagactttccatgcttcccctgctgttgtcaagttccgtgtcccgacaaagtccactccactggaggcctactctactcccgttctgccactggatattctcgctgatcgggctccagagaagaaatttgaattggcaaaaaggctcctagcgaaatatggatctctggtttcggttctcttccaattttttttttgggggttttttttgggggcgctgtttatctacatcgtagcaagcccttcgaaatcgaacgtagttaaaggaggaaagaagaaacgatagatggttactgaagttgccttgtgagttttgttcttatggtacctttaaa

SEQ ID NO: 1389 - DNA, 271 bp, Lilium asiatic
cggacgcgtgggcagcaactgaaagtctgcaagatgaagaaacatgttgctgatagtgctgacaaggttaacaaaaatgtatcagagaatgagatcgatcttaattttcccctgaaagaggagtcaccgggtgatcctgaaatgggattgttgactgatgggagcaaagacaaacctttgccgaaagttcgcaaaccgaggaagtgcagtgagcctgacgtggaagatgtggttttgccacaaggtactcctttgagtatggttgcaggtg

SEQ ID NO: 1390 - DNA, 264 bp, Lilium asiatic
tcggattccactgagcgaactctctgaacgccattgtctacgagaagaatctgtccaatccggggggggagataaaggcccagaagctcgccctcaacatctacgacggcgagagcggccatcgcgtaaacagggcctctaaggtattggagcaaatgagtggacagacatcctgggttttagaaggcaaggaacactgttctatcatttgggatcaggctcattgagaagatttgcgtgctatgttactgggaggggggagaa

SEQ ID NO: 1391 - DNA, 445 bp, Lilium asiatic
  modified_base (282)..(282): a, c, g, t, unknown, or other
  modified_base (385)..(385): a, c, g, t, unknown, or other
  modified_base (431)..(431): a, c, g, t, unknown, or other
gggcggacgcactgcgtgaagctcgtgcaccgcctctacccggaagtagacccagagctgaacccggaccatgtaccacacatgttgaagaagtgtcacactgagatcccggacccgaaggcggtacagtacgtccgcaacgacaggggcacgccgatggtgctggacaacaactattaccgcaacatccttgacaacaaggggctcttgctggtcgaccaccagctcgcctatgataagcgcactcgcccatatgtgctgaaaatggcgaagagccaggangttaacccttttttttcccttttttttttttcctggagttcagcaggggcattaagattctcactgagaataaccccttgaccggtgacaagggagagatcangctgcagtgcaacgtggctaacaagaggcacttaagtagtgttggngctgaaaggagtgt

SEQ ID NO: 1392 - DNA, 360 bp, Lilium asiatic
cggacgcgtgggcggacgcgtgggtggttatgcttgctaaagctctagaatatgaagattttgacaagtttgaccgtgttcgctttccaaagattcgatacgcaggaatgcttcagtatgatggtgaattgttgcttcccaaaaagtaccttgtttctcctccagagattgagaggacttctggtgaatacttggtgcacaatggtgttcggacttttgcttgcagcgagactgtcaaattcggtcatgttacctttttctggaatggaaatcggtctgggtacttcaacgaagccttggaagagtatgttgaaattcccagcgacagcggaattacattcaatgttaaaccgaagatga

SEQ ID NO: 1393 - DNA, 368 bp, Lilium asiatic
cggacgcgtggggcaaaagctacgagtatttagattgtcaaaccttcgcataatggataatttcaatgatcatctctgtatgaaagtttcagaggcttgtgcccgtgccaatgccatcgattatggcatgaaggcattatggaagcataacatttacgggttaactccgagcatcgcttctgctcattatttactgttgcatgctaaaaagaacaatgacattaagctcatggaaaggattatgcaagttctgcgaagaaactctttgccattgcaacctggtacagcggacatagtcttcagtacttggttcaacgcaaacaactgggatttgttatcgaagttctcaaaactttttctgaaagctg

SEQ ID NO: 1394 - DNA, 355 bp, Lilium asiatic
ggagccctcaatgtagatattggtgcaaacccctcagctgaaggtggtgaagatgatgaaggggttgatgaccaggccgtaaaggtggttgatattgttgacaccttccggcttcaggagcaacctgctttcgacaagaagcagtttatggcatacatgaagcggtatgtcaagcagttgacgcctaaacttgatgccgagcagcaggtgctatttaagaagcacattgagggggccattaagtttctgcttccgaagcttagtgatctgcaattttttgtgggtgagagcatgcaggatgacagtagcctggtgtttgcttattacaaggaaggtgctactgatccaacctttt

SEQ ID NO: 1395 - DNA, 372 bp, Lilium asiatic
cccacgcgtccggaggattaggaagggtttggagaagatgaggcctcctggtgcgacggagctattgttgtcgaatgacggcaatcggattctggagggcagtgtgaccaacttctttgccgtttgtcgcaagggggagtattttgaagtccaaacagctccaataggtgatggggtgctcccaggaatcatacgccaacttgtaatcgagatttgctctagtaaaggtatccctgtacgcgaagttgctccatcatggtcagaacacgaacattggacggaggcctttgtcacaagcagtctcaggcttctacaacatgttgagacaatagaagttcccctttcttgtacggagctgcaaatgaaagcttg

SEQ ID NO: 1396 - DNA, 456 bp, Lilium asiatic
  modified_base (438)..(438): a, c, g, t, unknown, or other
ccttattgccaaacggctatctcactgtgcaattctcgcctacagcacctccaagaagatgcatcaaatgtgactgctcttgtcgaaaacatgactgccccttttaatgataaagataatggagccagtcaatcgtctggcaaggctgatccaagccctttggcccttgagaaggaaatagagctgctaaagaatgtcttggttgatctcaaggggaagctggaagacatgcagcattctttggcaaatccgagaactgacatgtcagatgttgtgagcatgctgtttgataagccggctgccgctgcaactacttccagcacagaaggagcaagatctgtctcacaaacttcttcccagttgggtgtgaacaatagttgctttgattctccaacagtatccactgcagccactagcggtagtgtgacacatcttggngttgtgggtagaggcgtg

SEQ ID NO: 1397 - DNA, 317 bp, Lilium asiatic
cgatcaataaagatggcaagcgccgtacgttgcagaagaacccgcttaagaacctaaacactctgctgaggctgaatccctatgcacagactgatacgaggatggcgttgcttgctgaggcgcagcgtgtgaaagtcaagaaagaaaagctggacgagacgaggacaccactctgcacggaagaagctgataaaattaatgctgctgcaaacgcttgatacaggacgatgatttcagatagcgactataccgaatttgataacttcacacagtggcttgcagcctcacagagagtagctgcagcagcagagtagaat

SEQ ID NO: 1398 - DNA, 436 bp, Lilium asiatic
  modified_base (360)..(360): a, c, g, t, unknown, or other
  modified_base (379)..(379): a, c, g, t, unknown, or other
  modified_base (382)..(382): a, c, g, t, unknown, or other
gctgtattaactgatgcatgctccttgaaagaactgtgcgagttcaggctagcagagaatgtgaatctatctaactcttttatgattgaggatgtggcatctcggactggtgcagatgccttggctcgtctttgcgaaagattgagggaacaccaactcgaacagggtgatcctgattgtgaagaggtggcaactcgagaggtttagtgaaatagcagataccaaacaacattattcgcatatctggttctcattgttgtattataattttcaatttgccctttatacgtaagtaggtccagctcttgtatattttaccaagtcctatacaagtccgtcgtcgcttgcttgtgtaaactngggctacatgacgaatcanatngttgtcatgccgcttttggaagctaacatgcctcgtgtttctaggctttttttc

SEQ ID NO: 1399 - DNA, 272 bp, Lilium asiatic
ttcggtagccctcaatgtagatattgctgcaaactcttcatctgaaggtggcgaatatgattaaggggttgatgaccagtgccgtaaaggtttttgatattgtagacaccttacagctttatgagcaacctgctttcgacattaagcatcttatggcctacatgaatcatgatgtctagcatttgacgccttaatcttatgccgaatagcaggtgctattcaagaatctcatttgagggggccattaatgattctgctttccgaagcttagt

SEQ ID NO: 1400 - DNA, 361 bp, Lilium asiatic
cccacgcgtccgtcgaatccttcgctcccctccacggcggcgccttcgacgatctctctctggaccactctgcgcccccctcgttcgatctccccgtctgcggcgacttcgatggattccagaaggatgcgaccaagatgcttaagcacgccaaggggacgacaacgctcggattcatcttcaaggagggcgtcatcatcgccgccgattcgcgggccagcatgggtggatatatctcatctcagtctgtcaagaaaataatcgagataaatccacacatgctcggcacaatggctggtggtgctgcagattgccaattctggcacagaaatctgggcataaagtgtcgtctccatgagct

SEQ ID NO: 1401 - DNA, 280 bp, Lilium asiatic
attttctatacataaaaagtcatgtggcaccttcatctgctgattctggatcatcttgcaggataataattgatttctattggggaatggagttgtattctcgtattggaaaaaactttgatattaacgttttcacaaactgccgatttggtatgaagtcctgcgctcgtctagctgtgacttattgcatcaaacaatattaagagaatggcagcgtatctgattgcatgcttgtgaatactgtacttatgcttgggtaaatcaacaaagttcttttttt

SEQ ID NO: 1402 - DNA, 403 bp, Lilium asiatic
  modified_base (284)..(284): a, c, g, t, unknown, or other
  modified_base (286)..(287): a, c, g, t, unknown, or other
ggaaaggcaagcattacgaattcaagtcaattcgggtggacttcgtggagcaaattctggtgaacgagaaagtaccagctcctcatcacgccatccgggcttccattcgtgcacaacataagccgtgaagcacttttacagtttacagtgtgatttgatttgttatgtattttgggtcgcatagagattatgtaaatcaaactatttggttgacaagctagggtggttaagatttgtgcttgttgtatctcgtggttactggggcttgctgtgtattgcagggntnnttccccttttttttttccccaaaaacggcattttaaagatgtgaacagtattgggataaatttacctttttaacagttcagtttgcttttgttgtgtaaaaatttattttatcttt

SEQ ID NO: 1403 - DNA, 126 bp, Lilium asiatic
acgaatttgtgaagatgtaaaagcacgaggtagtttatgaataagtataggagaataacattaggggtgatattaaaaagaatggaggtattataaacatataataggattaaaggaataatataa

SEQ ID NO: 1404 - DNA, 405 bp, Lilium asiatic
acttggtctccatcaggatagagacgagtctgaagatagtatccgtaaaggagtgcctattgtttccttctctgttggtgactctgctgaattcctgtatggagaaaaaagagatgtggatatggctgacaagattgtgctcgagtctggggatgttttaattttcggtggcaagtccaggaacctttttcatggagtttcatccatttttccgaacacagcaccaaagcgcctcattgaagagtctaaactgaatcctggacgtctcaacctgacattcagacagctttagcagatacctggagccctcttatggtatttctgatcgaattttgtgctcttaggagtagtatctattgttatatcccttatggatacaaatgttctgaatatcataatattttg

SEQ ID NO: 1405 - DNA, 357 bp, Lilium asiatic
gaaagaccgacaacaaccgtattgcaaaggcttgtggtgcggtgattgtcaacaggccagaggaattgcaagagtccgatgttggaaccggggcagggctttttgaggtgaagaaattcgcggatgagtttttctcattcatcgttgactgcaaagatccaaaagcctgtactgtacttttaagaggcgctagtaaggatcttttgaatgaagttgaaagaaatttacaggatgctatgtctgtagcaaggaatatactgaagaacccaaagcttcttccaggtggcggtgctacagagttgaccgtttccgcaacactaaaacagaagagttcttctattgaaggcattgagaagt

SEQ ID NO: 1406 - DNA, 333 bp, Lilium asiatic
  modified_base (8)..(8): a, c, g, t, unknown, or other
tcgttttnttttttttaagcaagcactatatgaataaactcaaactgtgaccaaatttgaaatagtaggtgcaacttagggcatactaggggtaaaatgtagctgtaaagacaaccaagatcaagttggaaagaacttattgctgcagagactccctatgagtttatactagctcagatgtgattcttcaggaaatcgaggacaagcttgttcaccagctctggaaattgttcctgcacaaaatgggtcccctcggggacatatatgacttccagatcagggacaaaatgctatccttcctccttcctgatatagtcaaccaaccccgggaat

SEQ ID NO: 1407 - DNA, 417 bp, Lilium asiatic
  modified_base (402)..(402): a, c, g, t, unknown, or other
cggacgcgtgggcggacgcgtggggggagatcgaggatggggatgatgaaggaggcgctgatgcacccggaggatctgtacgtgctggtgaagatgaagagggcggcggcgcaggtggagaagcagatcccgtcggatccccactgggccttctgctataccatgctccagaaggtctcccgcagcttcgccttcgtcatccagcagctcggcaccgatctccgcaatgctgtctgcgttttctatctggttctcagagcccttgatactgttgaggatgatacaagcataccggaggatattaaagtgccaattctggcatcttttcatcgtcacatatataatcctgactggcatttctcatgtggtaccaaggattacaaggttctgatggataacttncgtaacatttcaact

SEQ ID NO: 1408 - DNA, 380 bp, Lilium asiatic
gtttgcgagtcctcaaccctgtccccgccgaagctgtctgcagcgctgccgatactgcgaatttcacagtagctcattccattgtagaacgaggccaatcatcgatcccgaaaatctttgcaaactcaatcagagctactgttgacaacaaaatggtgcttacaaacttcacaggcaccggtgtgggttttggttttggagttgggtgtggttttggagttggatggggttttggagggatgcctctgaatactgctggtctgggcataggtggaggctgcggcatcggactcggccttggttggggcttcggtagcgcgtttgggtgtcactacaggacttcgacggtcacctttcagggcattgaaatttgaaaacaa

SEQ ID NO: 1409 - DNA, 419 bp, Lilium asiatic
ttctcaaactacagctcaaactaagcagtaagcagacaaggtgtaacggatcaacaaacacggtgaaacacactggcaactacagataggaataaactcgcggagtccaacaaaaataaatagtcacaaatggtataagagatcaaagcccaggtatacagtcaacttcaaacaactctagagatgaattaacctatccatagatcaagtgataatcactggtttgcaatcacaagtacacagagtcacagataccaaggataaattcacaatatatataaatcccaatataagatcatatcaaacaaaactgtaaatgtagatcaatccacagattcaaaagaatcaacaagaagtatacagacttgctaagtaaaagctctttgtatcataaacatcatagagaattcaaaacatgt

SEQ ID NO: 1410 - DNA, 406 bp, Lilium asiatic
  modified_base (383)..(384): a, c, g, t, unknown, or other
gaggttttctagctattgaggtgtgtgtagccacaatgaagcccattttctgtggcaactgggagtatgatgctcgccagtctgagcttgaaagacttttcaaaagatatgggaaggttgacagggtagatatgaagtcaggtaagtctccttcatctactcctaggtaaatttcactaccatgttgtaaagaatagttttgtattgaagtgcgtgctgatctaaccatttagtttgttcctttttacatgtgatgtttctatatatctgcgtggctttcttttcccccttttttttttttggggggttttatattcataagtgttactcttcgaagtcctgcgtttcatgtaaacagaatcatacccctcgtgcttggttcnnctttaatatgtgctaaaaacca

SEQ ID NO: 1411 - DNA, 368 bp, Lilium asiatic
gttgagataacatacagaccgttcacagagttgctctctgctgctgctgaagctgatgtcggtttcacgagcacagcatccgagtcaccattgttcatgaaagagcatgtagaactgcttccttcagcgagtgttgggcggatttttgtggacatttcggtgcctaggaatatcgtaccttgtgtttcggatctcaaatctgtgcaggtttataatgttgacgatctaaaagaggttgtggaattcaacaaggaagaaccgtctgaggaaagcctgtaagtgttataaaaaggggcccccttattttccctggtgattattacacaagaaatgtgacgtgttgaggcttggagggactttactggaga

SEQ ID NO: 1412 - DNA, 400 bp, Lilium asiatic
  modified_base (280)..(280): a, c, g, t, unknown, or other
  modified_base (290)..(290): a, c, g, t, unknown, or other
  modified_base (295)..(295): a, c, g, t, unknown, or other
  modified_base (305)..(305): a, c, g, t, unknown, or other
  modified_base (333)..(333): a, c, g, t, unknown, or other
ctactgcatctgtgagaagccaattagagcatgctgctagcttgaagggagagcaggtagcaggtaggctcaagctcgatgacgacgagaaagatgagtggtttgttgtgaaagtgattcgttttgacaaggatgcaaaggaatttgaagtgcttgatgaagaccctggtgagggggaagaacttcctgctttgaatttgagaaagtacacgctgcctatgtcagatgttattccatttccaaagaaaggggatccttctagtgcaccagattttcctcncccagggggnggggnaaaagggganaaaaactgtgttggctgtctatcctggnctacagctttgtacaaagcaactgttgtgaatcctcatcgtaagaggaaatctgatgattatttgct

SEQ ID NO: 1413 - DNA, 399 bp, Lilium asiatic
  modified_base (331)..(331): a, c, g, t, unknown, or other
ctaatagtctcaaacttgaaaaatctgaatctttgataatggatcttaaggatgaactcgtaaaaaaacagactgaatgggaattacaaatgtctgaactaaaacagaaactgcaagacgcacacatgcgattgtcagaagagcagcaggaaacagaatatcagaagagatcccagtctaagttacaagatactgttgagagtcttacggaagagtgcaactctctccagaaactaaatacagatcttcggagacagaaattggagctgtttgaacgcagtacacatctggaggttgaactgaatgaatcacaaaagaaggctattgattntggtcagaaagtcgagtttctagagcgagatcttttatcactgcaaaaagatttcgatgcaaaagaaa

SEQ ID NO: 1414 - DNA, 323 bp, Lilium asiatic
gaatgctccaggccattgcttaagagacaatgcattaagtatctggggcctgaagagcgcgagcattacaaatatgtgcctatagaaggtaacatggtgcatacacaaactggagagcctatcgatacaactagaggacctgaaggtgccaaggggattgttgtgatgagcactgccaaaagatcttatgctggtcataaaaagaaaggtcactggcatcattccagcttcctcgcaggaggtgcaactattgctgctggaagatgcaccgcataaaatggagtgctcaagtctatctgggcatacagtggacactatcgccc

SEQ ID NO: 1415 - DNA, 416 bp, Lilium asiatic
cttcatcttcgtctccggcgatgactgtcgtcttgttcgcactcatggcctcggcggttctttccgatggggcggttttcaaggtcggcgataccgtcgggtggaccatcctcggcagccccaactacaccgcctgggcagccagcaaaactttcaccgtcggcgacaccgtcgtgttcgaatacaacaaggcattccataatgtcatggaagtgaataagacggactacaagggatgcaacacagcttcgccccgggttacctacacaacaggcaacgacacgatcaaactgaagaggaagggccatcactacttcatttgtggcattcccggtcattgcagcctaggacagaaggttgacatcagaattcccaagctcgtggcatcttcggcttcatcacccttgccatcgacg

SEQ ID NO: 1416 - DNA, 411 bp, Lilium asiatic
  modified_base (350)..(350): a, c, g, t, unknown, or other
gaaaaatgttgaggactctgtacccaaggcagttatgcacttcctggttaatcatactaagcgggaactgcacaatgttttcatcaggaaactttacagagaaaatcttttcgaagagatgctcaaagaacccgatgacataacagctaaaaggaaacggatccgagaaacactgcggctgttgcaacaagcatataagaccttggatgagttaccacttgatgccgagaccattgaaaaaggcttcaatctggatgctgatgcaactggtttgccgagggcccatgttctccccccttctttctatgcgactggtagcgattatggttcgccatcatacatggcttctnctaagaatccgaagtcccggaggtctgttcactcaggaaagcagccatccccatgcatgca

SEQ ID NO: 1417 - DNA, 146 bp, Lilium asiatic
atgcacttcctgtgtaatcagactaagctgtaactgcacaatggttccataagtaacactttactatgaaagacctttggaagagaggctaaccgaactcgatgacatagcagccaagaggacacggatacgaacatcactgttgc

SEQ ID NO: 1418 - DNA, 376 bp, Lilium asiatic
ctaatagtctcaaacttgaaaaatctgaatttttgataatggatcttaaggatgaactcggggaaaaacagactgaatgggaattacaaatgtctgaactaaaacagaaactgcaagacgcacacatgcgattgtcagaagagcagcaggaaacagaatatcagaagagatcccagtctaagttacaagatactgttgagagtcttacggaagagtgcaactctctccagaaactaaatacagatcttcggagacagaaattggagctgtttgaacgcagttgaaccgaaaaacccaaaatttttttccctattgaggttgaactgaatgaatcacaaaagaaggctattgattttggtcagaaaagtcgagtttc

SEQ ID NO: 1419 - DNA, 363 bp, Lilium asiatic
  modified_base (333)..(333): a, c, g, t, unknown, or other
cagaagtcattgaagaaaatgtgcattgaaggtgcctattggggaactgttgctggtgtatatgtgggaatggaatatggaatggaaagggtccgtggaactcgagactggaagaatgcaatgcttgggggcgcgttaaccggggtgataatatctaccgccaccagtaagggtaaaaacagagacaaggtggtcttggatgccatcacaggaggtgccttatcgactgctgcggagtttcttaattacctcatttgagaggtgaatacggcaggaggcgatcgagttgagtgtaccctcacatctatgcccgtctgttgtagatcgaggcanaaataatgaagaggagacctgtggtctcat

SEQ ID NO: 1420 - DNA, 438 bp, Lilium asiatic
  modified_base (269)..(269): a, c, g, t, unknown, or other
  modified_base (342)..(343): a, c, g, t, unknown, or other
  modified_base (359)..(360): a, c, g, t, unknown, or other
  modified_base (386)..(387): a, c, g, t, unknown, or other
  modified_base (394)..(394): a, c, g, t, unknown, or other
ggaggacatgtatctgcagtccaaggagaagaatctcaaggctgtgaggcttgcggagatgaacaagaggaaccgagctgagaatttcaagaatgcctcggagttgaagccggtcaacaccagtttaaaggcgggagaggcagggtacgaccccttctcgaggaggtggacgagatcgacgaattattatgtgtcgaagactgcgagcgaggcgaatggatcagcggcaggggtcaatggagagggtgctagcgagccaaatgggatcnggaccggagggcccaagggggggggaaagggggaaaaaaaaagggggcgagcaaccagctggcagcgctcgannagcagccggagatgcnnaggcaagctttaattggggacacaanngtgcacncggtcgggcccggaagcactttgaacaaaaacttcaaatcccac

SEQ ID NO: 1421 - DNA, 149 bp, Lilium asiatic
cggacgcgtgggcgagtgagaaagaggagagtagaaaacaagagagcgggaggagagagaaagcgacagatctccgatctcgccgctcacgatctcctccacggccggagactccgtcgattcgatctgagaggggggtttgtttttgt

SEQ ID NO: 1422 - DNA, 409 bp, Lilium asiatic
gcaaagtggaagaggttcctgctgtttttactggagatacattgttcgttgctggttgcgggaagttctttgaaggcacagcggaacagatgtaccaatcactatgtgtgaccttgggttcactgccgaacccgactcgagtttattgtggccacgagtacacagaaaaaaacttgatgtttgcatcgactgttgagccagaaaatgaaaagataactcagaagcttgcatgggctaaacaccaacgccaagcaaacctgccaacgattccttcaaccattgcagaagaatttgagacaaatccatttatacgagttgatctacctgagatccaggctaaggttggttgtcattctcccggtgaagcacttggagaaatcaggaagctgaaagataaactggagggctg

SEQ ID NO: 1423 - DNA, 359 bp, Lilium asiatic
ttttataaaattctctaacaatatcttttatgacaaatccaacagcatataatagaaaacaggaccagacacataaaccagaactaggttttccaacacacaagagtaccaccaaataactcctaaatgcagcgctacaaaatatactagaaaagatccaaccaccaaaagtcagatcatctctcccacaactcagcaaaggttaaccatctctccagaccaagaagtttcacacctactcaatgagatcatcatcatcatccggaaggggttgcaacatagccctttgtaactccgcctcatgctgttgttgtgccacaaggtcaatctgaacctcaagtggggcaagggctggtgac

SEQ ID NO: 1424 - DNA, 328 bp, Lilium asiatic
  modified_base (298)..(298): a, c, g, t, unknown, or other
tctcgctcccatcagagttttcgtaggcctgtggtgctacttttctttgcaaggatggtgagaatcagtgttctgaatgatgctctgaagagcatgtacaatgctgagaaacgagggaagagacaagtcatgatcaggccatcctcaaaagttatcataaagtttctaatcgtcatgcagaagcatggttacattggtgagtttgaatatgttgatgatcataggtcaggtaaaattgtggtcgagctgaatggacgtttgaacaaatgtggtgtcatcagtcctcgctttgacgtangtgtcaaagaaatagagccttggactgcga

SEQ ID NO: 1425 - DNA, 406 bp, Lilium asiatic
cggacgcgtgggcggacgcgtgggcggacgcgtggggtgccttgaagctactgtatgggaagggtattgcttgtgtttcgggggattcgggtatcggcaagactgaattggttctggaattcgcctaccggttctcacaacgatacaagatggttttgtggatcggaggcgagacgagatatataaggcaaaactatctgaacttgcggacatctcttgaagttgatctgagcattgacaatcactcgcttgaacgagggagggtcaagagttttgaagagcaggaagaagttgccattgcaagggtgaggaaagagctcatgcgtgacatcccgtttctcgtcgtgatagataatctcgagaatgaaaagactggtggacccgaaagcgttgatggatcttcttc

SEQ ID NO: 1426 - DNA, 387 bp, Lilium asiatic
atttggagctgcgagcagaaccagaaatgtaaaaaagattttaccttgcttgcatatcatttcaggggactggaggggtgggggacctcattatattatcgaatgcattaccttgtttgaccctctaaaaaaatgtatgagctactatttacttttggtgtacattcacttatatatgatttttgcggacctaattcctgcaccctgctttgatatctttttggaatcttgaactatccttgttaaacttgatttgactctctaaaatgcttccacccttatccctctgtaagatagtggaggtaaattcgtcacacttgttagggaattatgtgatgtagagtaagatttattattttgtcttgaagatgaatgagaattactatt

SEQ ID NO: 1427 - DNA, 322 bp, Lilium asiatic
tgaagagactgggaaatagtaaagaagaatccaattcagataatgaagagaaataggagtatggatacagaaggcataaacagtgtgttgtgtgttgccatgaggagttgtgggtttgaaagattgaatggagatggttggagctcaatgaaataatgtctatagagaagcaatggagtgtgctagagttgtgatccatggtaatatggtatagtgatgggagatgatgagcagtttgtatgtggctatggagttgtaaggcagcgtggttagaaaatgttcagaggcagtatgtgactatggagtatgaggaaaatgttga

SEQ ID NO: 1428 - DNA, 401 bp, Lilium asiatic
  modified_base (298)..(298): a, c, g, t, unknown, or other
tctcgctcccatcagagttttcgtaggcctgtggtgctacttttctttgcaaggatggtgagaatcagtgttctgaatgatgctctgaagagcatgtacaatgctgagaaacgagggaagagacaagtcatgatcaggccatcctcaaaagttatcataaagtttctaatcgtcatgcagaagcatggttacattggtgagtttgaatatgttgatgatcataggtcaggtaaaattgtggtcgagctgaatggacgtttgaacaaatgtggtgtcatcagtcctcgctttgacgtangtgtcaaagaaatagagccttggactgcgaggctgctcccatcgcgtcagtttggttatattgtgctgacaacttctgctggtatcatggaccatgaagaagc

SEQ ID NO: 1429 - DNA, 285 bp, Lilium asiatic
atcgtctcgctaccatcagagttttcgtaggcctgtggtgctacttttctttgcaaggatggtgagaatcagcgttctgaatgatgctctgaacagcatgtacaatgctgagaaacgagggaagagacaagtcatgatcaggccatcctcaaaagttatcataaagtatctaatcgtcatgcagaagcatggttacattggtgagtttgaatatgttgatgatcataggtcatgtaaaattgtggtcgagctgaatggacgtttgaacaaatgtgggggtcattt

SEQ ID NO: 1430 - DNA, 226 bp, Lilium asiatic
actgggagatagtaaagaagaatccaattcagatcatgaacacaaataggagggtggatacagaaggcataaacagtgtgttgtgtgttgccatgaagagttgtgggtttgaaagattgaatggagatggttggagctcaatgaaataatgtctatagagaagcaatggagtgtgcttaagtcgtgatccatgggaatatgggatattgatgggagatgatgagca

SEQ ID NO: 1431 - DNA, 401 bp, Lilium asiatic
gactttgtcttcctttaggtagggaacctttcctttctttcaggtgcaactggacatgccatttgtggtactatgatgagtttcgttccttaatgagtgtgtggcgacatcttctttcgtgctgttggctccacagggcatattagggcacggaaaggcctaataggggactgcatctctcctccaaaaaaaggtaaaataaatacttgttcgtgttattgttccttgttaggcgtagcgtttgttctggcaataggtctgttacagaagccaaaaggtttttccaaattttttttttccccccaactcaattgattgatgccccgcccattcctagccttaactccgcttttttgatcgaagctctacctgcacctggctgggcgtgtctattagttctc

SEQ ID NO: 1432 - DNA, 234 bp, Lilium asiatic
gttgcgaatccttacgatctcatcgctcaaaccgcaagaccatatggtcagagagccggcgggaacattgcacactacatgggagctcatcccattggtgggaggcacactccatgaactttcactaatgaactgcagacctctttcagtgagccaccgcttctcatcctcactgatcccagaactgaccaccacccaatcaaggaggctgtactgggtaacattaccaccatt

SEQ ID NO: 1433 - DNA, 373 bp, Lilium asiatic
  modified_base (360)..(360): a, c, g, t, unknown, or other
ccgggaccgagcgggatgatgacgatgcggaggttccactccggcgaaccgaacatcaggcccgcggcttcgactgatccgtaccggagcagcagcggcggcggcgggggaagctctctcatcaggcacagcagctctcccgctgactttttctctcatctcatggtcaatgacggggggatggaccactattctcttgcaaccaatggtgttcccacaatgacaaatagaaggctgaaatcccaactgagcttctcaagacaagacacactttctcaaatatctgaaataagtgtcccagaaacgggagagagcgttgggggcaacaactcggatgaaacagctggaaatgctgctaancgcgcctatatgc

SEQ ID NO: 1434 - DNA, 354 bp, Lilium asiatic
gatgaatttgggtatatgttggagggtatactaaaggaaaacaacgtcaacagttctggtgttcgatttgatgtgggcgcaagaactgcactggcatttataacactcagagctgacggggaacgagagtttatgttttaccgcaatcccagtgctgacatgctccttcaagaatctgaacttgatgttgatcttataaaacaggcgtgcatctttcactatggctcgatcagtctaattgcggagccatgcagatccactcatatgaaagcaatggacatagctaagagatcaggttgtctcctgtcatatgatcctaatttgaggttgccactgtggccatctgctgatgct

SEQ ID NO: 1435 - DNA, 427 bp, Lilium asiatic
cggacgcgtgggttggtctggaggtagcgggaaagggaaaaggcaagggacggtctacgagtggaagatgaagggcttatcctcccttcaacccttccgaggaggggaggggctggacatcttctcgggactgtttgtcgccggaggttacaaatgggcgctacacatgatgactactaaaagtgaagatggtgcagtatatatgtgtctccagctccgtctaataaccatactatcgcattcttccaaagttaaagcagaatacaactttattatttatcaccagctgcttaacaagcacatcaaggaatcaggtgtatccgagtttatgagtggatcatatgatggggagtttcattatatgataccgcttgaaatgttcaaagacgcctcttcgggattccttataaatgacagtttcttcatc

SEQ ID NO: 1436 - DNA, 425 bp, Lilium asiatic
cccacgcgtccggagagtgaagaagaagtggcaatggcggaggggaaggggtcggccctcgtccacctcctcgttatctccctcagcctcaccgccttcggcttctcgatcgccgccgagcgccgccgcagcacaggcacaatagttaccgacaatctgaatgcgacctactgtgtgtatgactccgatgtcgctactggttatggagtaggtgctttcctctttctttttgctagtgaatcactactcatgggcataacaaagtgcatgtgtttcggccttcctttagcccctggcagtagccgtgcttggaccatcatttattttgcttcttcgtggctcaccttcttggttgctgaggcttgtattctcgctggtgctacaaagaacgccaccatacgaaataccaacatgtgatctatgct

SEQ ID NO: 1437 - DNA, 383 bp, Lilium asiatic
caattatccaaaattctagctgctttgaggacttacaggatgtacagattttgggtgcaaacatgtcggctcttggactatcacagaaacctatttatgctcatgctactgctgaagccccaaaggaaaatcataatgacacttcagactctctagaaacaattcccgatgctgtgccagttattctgactaagcctcctgttgaggaccaactagcctggcatactttgtggccagagtcccacaagctttatgggcatggaaatgagctattttccctttgttgtgaccatgagggaaagattgttgcttcatcatgcaaggcacagtcagccaatgtcgcagagatatggctatggcaagttggttcatggaaagctgtc

SEQ ID NO: 1438 - DNA, 406 bp, Lilium asiatic
  modified_base (278)..(278): a, c, g, t, unknown, or other
  modified_base (376)..(376): a, c, g, t, unknown, or other
cggacgcgtgggtgcatacacagccgaatgagcttccccagctatctcctcaggatctgacggcccatgcacggattcttgagaacaacaagcagtgggatggcgagaagtgcataattttgacctgcagttttactccaggttcctgctctcttactgcatataaacttacaccaacaggttatgagtgggggcgtctaaacaaggacactggaagcaatcctcatggatatttacccacccattacgagaaggtccaaatgctcctcagtgatcgncttttcccttttttttggggggggggggggggaatctacatgattccgagtgatggcccgtggaactacaactttatgggagttgaagcatacagtangtatgaagtatggtgtaaagcttggcacgc

SEQ ID NO: 1439 - DNA, 328 bp, Lilium asiatic
  modified_base (314)..(314): a, c, g, t, unknown, or other
  modified_base (317)..(317): a, c, g, t, unknown, or other
cagggaacttcacacaactcaagatcatggacgccttcgacatgcactttgcgaggaccatcgccatcaacctcccgaagctgaaagttctgagcctgcgatgctccaagcttaccaaagaagccctgctcttcatcctcgacaacatggtgcatctcgaggtgctgaacatctcccactgcattctgctggagacccctaccgtgccaggcaccaagcgtgtggtgatcgaagaggcccctactgtgtcaggcaccaagcgtgcagtgatcatcgatcgcacgatcatcgaaaaggctgcgtcacgggtgcgnganttttactactg

SEQ ID NO: 1440 - DNA, 367 bp, Lilium asiatic
gcgaccgacctgctgaggcatttgaaacagtgggtacattctcggaaaatttaccaggacctagtaggccaaatagcttaaaagagaagggcgctgccgagccagattcccgggtggtggaaagtcgtgacagaagcctcacaaaacgtctggtgaacatgttgggatcaaaatatgcacctcctgcttatgctgcagaaccaacatcttctagcaaatacggggggacgggaggtctgcaactaattctgcaagcctctccatccacggacactggtggggaggatttaaaaagaaaaatataatatacccccaggcaaacggccttgaagagatgggcagggccgagcacttggtcatgcataga

SEQ ID NO: 1441 - DNA, 382 bp, Lilium asiatic
tgccgccgtcgccgttgctgccaccggagctcgttgtagtctaaggacgaattggagctggttgacacttgataaaatgtcccctcccgcgaaagatgccatgacgcctgatggtaaagcacaagcattgaaagttgccaaggctgtgaaatctggtgcttcaaccctgcaaaagaaggccaagaagatccgcacatcggtgacctttcatcgtcccaagaccctgaagaaggatagaaaccccaagtaccccagaatcagtgcccctccaaggaaaaacccaaaaaaaggggcccccctttttttaacatcactaccagatccttaagtattcactgaccactgagtctgccatgaaaaaagatttgaagacaacaacact

SEQ ID NO: 1442 - DNA, 335 bp, Lilium asiatic
  modified_base (7)..(7): a, c, g, t, unknown, or other
tcgtgtnactgcaagaacttcacacaactcaagatcatggacgccttcgacatgcactttgcgaggaccatcgccatcaacctcccgaagctgaaagttctgagcctgcgatgctccaagcttaccaaagaagccctgctcttcatcctcgacaacatggttcatctcgaggtgctgaacatctcccactgcattctgctggagacccctaccgtgccaggcaccaagcgtgtggtgatcgaagaggcccctactgtgtcaggcaccaagcgtgcattgatcatcgatcgcacgatcatcgagaaggctgcgtcacgggtgcgtgagttttacta

SEQ ID NO: 1443 - DNA, 417 bp, Lilium asiatic
ggatcacgacccaacgatctggttcgccgacaacggcgagcgcctcggaaactatcgcggccacaacggtgccgtctggtgctgcgacgtctccagggattcgacgcggctcatcactggcagcgccgatcaaaccgtcaagctgtggaatgtgaggacgggggaacagttatatagcttcaatttcgattcgccggccagggcggtggatttctctgtgggggataagctggcggtgattacgacggatcctttcatgggacaaccgtcgtcgattcaagtgaagaggattgctagtgatcccagtgagcagactagtgaatcggtgcttactatcactggtccctcggggaggattaatagggcgatctggggtccactaaataggaccataatcagtgctggtgaagatgctat

SEQ ID NO: 1444 - DNA, 438 bp, Lilium asiatic
  modified_base (319)..(319): a, c, g, t, unknown, or other
cccacgcgtccgcccacgcgtccgcggcggatgttcttcatcagctgaagaaccatggatgctctttggttcttatcacttacaatactgtgattgatggattagcaaagagtggtgaaattgagaaagcaatggttctgttcgatgatatgattagtgatggaataagtcctgacgacatcacttatggttcactggtaatgggcttttgcaaaaaggatatggtggaagaagcggtggagatgttgaaggagatggccaagttgaattgcaggattcgaggcataacttatgcgctagtgatacaggccttatgcanaaaaaagaagatggatactgctattgctattttgaatatgatgatatcaagtcgcaacagacccaacaatgcaatctatgcatcactggtttgagcggtggctggctcttgtatgatag

SEQ ID NO: 1445 - DNA, 419 bp, Lilium asiatic
cggacgcgtgggcagcaactgaaagtctgcaagatgaagaaacatgttgctgatagtgctgacaaggttaacaaaaatgtatcagagaatgagatcgatcttaattttcccctgaaagaggagtcaccgggtgatcctgaaatgggattgttgactgatgggagcaaagacaaacctttgccgaaagttcgcaaaccgaggaagtgcagtgagcctgaggtggaagatgtggttttgccacaaggtactcctttgagtatggttgcaggtgttgaatttctggagaaagatgttgggcatgccttgcagttcttggaattctgcaatgctttttccaaggttcttggtttaaagaaaggtgatgctgaatctcttcttcgggagttagcaagaggacacatttgacggtgtgggtatac

SEQ ID NO: 1446 - DNA, 394 bp, Lilium asiatic
cgaagctgcaagaacttcacacaactcaagatcatggacgccttcgacatgcactttgcgatgaccatcgccatcaacctcccgaagctgaaagttctgagcctgcgatgctccaagcttaccaaagaagccctgctcttcatcctcgacaacatggttcatctcgaggtgctgaacatctcccactgcattctgctggagacccctaccgtgccaggcaccaagcgtgtggtgatcgaagaggcccctactgtgtcaggcaccaagcgtgcagtgatcatcgatcgcacgatcatcgagaaggctgcgtcacgggtgcgtgagttttactactgtcagaaccgtacgtgtactgcatgtcagaggatggcgagcgatgatgggctcatgcgat

SEQ ID NO: 1447 - DNA, 157 bp, Lilium asiatic
agcgcgcttgaaactattgcgggggcaacggtgccgtctggtgctgggacctcttcaaggaatcgacccggcttatcacttgcagggccgatcaaaccgttaagctgtgtaatgtgaggaccggggaacaagtatataacttccatttccgaatcgc

SEQ ID NO: 1448 - DNA, 299 bp, Lilium asiatic
gctatgtgatgattgcttgatatgttactgttagaggcgagaaggcgatgcagctactggggagtgggttgaaggtgaaggagtatgagctgttgaggaggaatttcagagataatggatgctattcgtttggtattcaggaacacattgatcttgggattaagtatgatccttctaccggtatttatggtatagatttctatgtctttctggagcgccctgtatatcatattggacgtcgatgtatgtgcaagtttcgattctgaattcaacaaacccccctttttgggggttttttt

SEQ ID NO: 1449 - DNA, 257 bp, Lilium asiatic
gaccgcgaccaacgatgaaatcgccgctgacctcaagcagcatgtgatcaagccggctggcgcagagcagttccttgactagaagaccattttccacctcaatccatctggtcgctttgttattggcgggccacatggtgacgctggcctcaccgggcgcaagattattatcgatacttatggtggttggggagcccacggtggtggtgccttctttggcaaggacccaaccaaggttgaccgctgtgtagcttaca

SEQ ID NO: 1450 - DNA, 442 bp, Lilium asiatic
  modified_base (413)..(413): a, c, g, t, unknown, or other
cggacgcgtgggcggacgcgtgggcagaacaagaactcatcctactttgtggagtggatcccaaacaatgtcaagtcaagtgtgtgtgacatcccaccgaaggggctgaagatggcagccaccttcatggggaactcaacctcgatccaggagatgttccgtagggtcagcgagcagttcacagccatgttcaggaggaaggctttcttgcactggtacacaggtgagggcatggatgagatggaattcaccgaggccgagagcaacatgaatgacctggtggcggagtaccagcagtaccaggatgcaaccgcagatgaagagtatgaagagcaagaagatgaggctgaaacctgaggtatattctcctctcgacaagtttttttcccttttggcttcagattgcttatcangatggggtgcggaaatgttggggtattct

SEQ ID NO: 1451 - DNA, 355 bp, Lilium asiatic
cggacgcgtgggtttcagatggcgccgtcagcttcttccttcggcgcctcctattttttcccacgatcccgtgtctccccacattgccgtccactgttttgactggtctgtagttgcttgttttgttattttgttttattttgtgctgcttttcttgcagatgaattgggctgggctgctgtttgcctgatgaaagcgaacctgtttattttgtgctccttgctgatctttgcctgatgtcggcgatccttctgtctactagatctgattgacaaatgtagcccaattctcagatctatgatggacttctgtggttagctgctccgatttgttcttaattggacaagatatgctc

SEQ ID NO: 1452 - DNA, 396 bp, Lilium asiatic
agatcacagagcttcatcgtcttcatcaagatggccagaaagttcttcgtcggcggcaactggaaatgcaatgggaccagcgaggaggtgaagaagatcatcgggatgctgaattctgctgaggttccctcgggggatgttgtggaggttgtggttagccctccatatgtgtttcttcctttgacccaaagtttgctgcgttctgatttccatgttgctgcacaaaattgctgggtgaagaaaggaggtgccttcactggtgaaatcagtgctgagatgcttgtaaaccttggtattccctgggtcattcttggtcactctgaacgaagggctttgctaggcgaatcaaatgagtttgttggagagaaagttgcatatgcactctctcgtggtctg

SEQ ID NO: 1453 - DNA, 452 bp, Lilium asiatic
  modified_base (381)..(381): a, c, g, t, unknown, or other
ggctctgaaggccaagggtgtggatgagatcctggtgattagcgttaatgatgcatttgtgatgaatgcgtgggcgaagacctatcctgagaacaagcatgtcaagttcctagccgatggatctgggaagtacactaaggctcttggtctggagctcgatctctctgagaaagggctggggctgcgttcccgcaggtatgcaatccttgttgacgacctgaaagtgaaggtcgcaaacattgagcaggctggggaattcactgtttccggtgcagaggagatccttagggctctgtgatctgctttgcttttagtcccaccttggttcttaattatgttgggctctgttatgaactatgtactggagattctatagcttangaacttgtgctcggcacttgagttgtctggtggttggggtttgttctctgagtttggtcctatggtcttta

SEQ ID NO: 1454 - DNA, 350 bp, Lilium asiatic
ctgatctgtgttgctgagcacctccattcactgatgatctgtgtttctgagccaaagcgtagggcgaggttaagtgggcaaaatggtagtgggtttagtgcaattgggtggagcagaggtggacctcatgtgtttacctgatctgtgtttctgagccaagcctagggcgaggttaagtgggcaaaatggtagtgggtttagtgcaattgggtggagcagaggtggacctcatgtgtttacctgatctgtgtttttgagccaagcccagaccgaggttaagtgggcaaaatggtagttggtttagcccaattgggtggagcagaggtggacctcatgtgtttacctgatct

SEQ ID NO: 1455 - DNA, 399 bp, Lilium asiatic
atggatcccaatcagcaggagcacgaggtctacggcgccgacatccccgacgaggaggcctacatggatgccgacgacgaggtcgctgccgccactgccgcggtcgagaacgacgacgaatccgtcgctaaggctgagaatatcgaggacatgaagcggcggctgaaggagattgaggaggaggccggcgcgttgcgggagatgcaggcgaaggttgagaaggagatgggcgccggccaagaagatccatctggtgcgtctacaacccaagctgagaaagaggaggcagattctcggtcgatctatgttggtaatgtggattatgcttgcacccctgaggaagtccaacagcatttccagtcttgtgggactgtaaacagagtaactatcttgacagac

SEQ ID NO: 1456 - DNA, 60 bp, Lilium asiatic
aacgtacggtccatgccggttcgcaaggactacgaggcccaggttcccccggggttcttt

SEQ ID NO: 1457 - DNA, 97 bp, Lilium asiatic
tttaattccgatcgacgcactcttctctactctgttctctaacgttcttccttttttctttatatgtaatccatgaaacatagcctcattataattt

SEQ ID NO: 1458 - DNA, 428 bp, Lilium asiatic
  modified_base (375)..(375): a, c, g, t, unknown, or other
cggacgcgtgggcgcaagctcacccaggacgatctctccaaccagtctccatctacaaacaacttgggatctctgtggaatcgggctggaacctgggaggaaaaaaaccttaatacttgggcacgtaatagaataaaggagttggcttgttctttaggttctctggaactttcttggggtaaagcgcatgttgttgaggtgtccaaatgttcaggcgatgctttcttggtcattgtgcgtaataaaaaaagaagttggctacagttatgaactgacagtgaagtttagaggggagatattaatccaagaggagactaaaaagttcaaggggcgcctggaaatttcagagttctcatacggtgagcttgatgactngcagattgatgtgagactcgatccagaggagcttgggtcggaggagaagatgc

SEQ ID NO: 1459 - DNA, 213 bp, Lilium asiatic
tcgttgactcgtgttcgcaagcttacccatgactttcttttcaaccagtctccatggtacaaagggcttgtgatctttgaggaatcggtctgtaacctggtaggaaaaaaaccttaatacttggtcaagtaattgaataaaggagatggtttgtcttttaagttctttgtaactttcttgttgttatgcgcattgttttgatgtgcacaaatg

SEQ ID NO: 1460 - DNA, 284 bp, Lilium asiatic
ataacacaagaaataaaagagaaagaaactatcggccccattatgcaaaggcatataatagggttcaaggggaggcatgtgtacgatgtaacaaaaacctttgatagtgtcaaccgtccaaatgcatcgttgacacgagttatgatgccacactgcgtgatggttagagtctactcattcgctttatggataaaaggaagatgagttcaaacacctatagttgtaagcgatgctgtatcacatgtgatatgatttgaataaccattgtctaagatacagggagc

SEQ ID NO: 1461 - DNA, 251 bp, Lilium asiatic
aacgtccgctccatgccggttcgcaaggacgacgaggtccaggtcgtccgcggtactttcaagggccgcgagggcaaggtcgtgcaggtctaccgccgcaaatgggtgatccacgtcgagcgaatcactcgcgagaaggtgaatggctccaccgttaacgtcggcatcaacccctccaaggtcgtcgtcacgaagctgaagctggacaaggatcgcaaggcgttactggaccggaaagcgaaagggcgtgc

SEQ ID NO: 1462 - DNA, 218 bp, Lilium asiatic
aacgtacgctccatgccggttcgcaaggactacgaggtccatgtcgtacgcggtactttcgggggcttttagggcaagggcgtgcatgactaccgtcgtaaatgggtgatacacgtagagcgaaccactcgcgagaaggtgaatggctccacagtttacgtccgcatgaaccttttcaaggtcgtctgaacgaagctgacgctggacattgatcgcaa

SEQ ID NO: 1463 - DNA, 351 bp, Lilium asiatic
gaaacggttactaaaagggtgtttgaatttaatccgaagagttgaggagtttattttctgatgtctcagagagtagcattgatgcggaacgctcggcccacatacgcgcgagagaaaatcacgtagtggtgtcaaacttttctcacacctcgtctcatatcttgttcaactaatacccgagagaaggactaaccaagtgtgcctcaatatcattagagagaaaatccagtttcagcctgaacacatcatatcgaaggctgcatcaacaggaactacacttgagatccagatatctgacatctacaacggccagggcacaaagaaaatgaataatctgataattttttatac

SEQ ID NO: 1464 - DNA, 317 bp, Lilium asiatic
cacgatgctgcttttgattcagattcaatcgaagcccgaatgctaggatggcttaggaaagcttcgtctccgacagttgcaaatataaaccttgacattgctgatcatctagatacagttgaggtgtttccttttcacattcctgatctttcagttgggtacccattggttatatcaggcaaatatcaaggcaaattccccaaatctttaaaagctaatggcattttagctgacatgagtgacattgttattgacttgaaagtgcaaaagggggaagatatccctctggaaaaaggcatttggaaaagaacaaaatt

SEQ ID NO: 1465 - DNA, 428 bp, Lilium asiatic
atcgaactgaggaacacgcttttctacctgttacagcagcagctctcccgggtattctagagcgacggtgctctgcaactgcagataaacctattccaatgggcaaacaaaaagagggtgtggacaaaaaaactgctaggaagatgatccgttctacagaaggctgtgcaaagagcatgactttcgagaggaacaacaattcatacgatgtgcagctctacgatctgtcgaatgacattctatgtagcattctattacggtagacattcagagaatcctcacatttttgtcttgtttttcatacctggcaaatgaataatagataatctgtttcctgtttattgtggatgaactatttcatcatgttgcaaaccctttttttggttttttgatgtttattatgacttctttttttttctaataatttt

SEQ ID NO: 1466 - DNA, 128 bp, Lilium asiatic
tgctactcttgtaactcttcatacattagcatttcataacatcacatgatttcggtcctaagatgtttatcttacgaatcttactaatcattaatatggacagtccatttctttttcatatcatattc

SEQ ID NO: 1467 - DNA, 429 bp, Lilium asiatic
caaaacagtcgagatcggatcgacaatggccgacgaggggaggcccgacgctcagctctgccagctcctatcaacccttctccaacaggtggaatcagtgagcaaccaagaagaggttgaattgcgcgcaaagatagaagcattgggtttagaggtcaccaaggtgccaacaaagccatccagggaacttaatgagctggaaatagctgcagagttggacaaattgtcagccaggattgatgatgttgacaagatgatatcatcggctatggctgccgaccctcaggtgcagtctctcctgagcagtactgctgatgtgtggatgccggtcatcacggccactgccgatgaaaggcgcgggtttgctggatccagtgaagaaggtaatcttgaggagcaattggaattgcctagccattagattccttg

SEQ ID NO: 1468 - DNA, 290 bp, Lilium asiatic
  modified_base (6)..(6): a, c, g, t, unknown, or other
  modified_base (20)..(20): a, c, g, t, unknown, or other
  modified_base (23)..(23): a, c, g, t, unknown, or other
  modified_base (27)..(27): a, c, g, t, unknown, or other
accggntggaataccgggtngancaancttccgcaaacagtcattatcggatcgacaatggctgacgaggcgaggcccgacgctgagctcttgcagcttctatcaacccttctccaacacttgtaatcatttagcatccaataagaggttgaattgcgctcaaagtatagtagcattgggtttatatggtaccaatgtgccttctgattcattcagggaacttaatgagctggaaatagctgcattgttgttcattattttagccatgatttgatgacgttgacatcgat

SEQ ID NO: 1469 - DNA, 328 bp, Lilium asiatic
gaaacggttactaaaagggtgtttgaatttaatccgaagagttgaggagtttattttctggtgtctcaggcagtagcattgatccggaacgctcggcccacatacgcgcgagagaaaatcacgtagtggtgtcaaacttttctcacacctcgcctcatatcttgttcaactaatacccgagagaaggactaaccaagtgtgcctcaataatattagagagaaaatccagtttcagcctgtacacattatatcgaaagctgcattaacaggaactacacttgagaaccaaaaatctggcaactacaacggcccggggacaaagaaaatt

SEQ ID NO: 1470 - DNA, 270 bp, Lilium asiatic
gaggaagttaatctgaatggaatgcaacacaaaaacgagatacataagatgcgactccaaggcggaggacaggaggaagttaatctgaatggaatgcaaaacaagatacgccaaatgcaactcgaagatggaggacaagaggaggttaacgtgaaggagttaaaatataaaaaacagcaaatgactaccaattctttcgaccctcctcaagagcttggtgatggacgccccaaccatgtttattctggtcaggatagagagccaagaggt

SEQ ID NO: 1471 - DNA, 433 bp, Lilium asiatic
cgtgcggaaacggttactaaaagggtgtttgaatttaatccgaagagttgaggagtttattttctggtgtctcacggagtagcattgatccgcaacgctcggcccacatacgcgcgagagaaaatcacgtagtggtgtcaaacttttctcacacctcgtctcatatcttgttcaactaatacccgagagaaggactaaccaagtgtgcctcaatatcattagagagaaaatccagtttcagcctgaacacatcatatcgaaggctgcatcaacaggaactacacttgacatccagatatctgacatctacaacggccagggcacaaagaaaatgaataatctgataattttttatacggaagttctctatacattggtgtaactttcttcttgtaattgcagtctaatgaactcactactgtcacagagataa

SEQ ID NO: 1472 - DNA, 237 bp, Lilium asiatic
cggacacctgttagaacccctcgacttttaagcacgcagtcttctgctatgcttcgttcagaagcgagaagtttggccttcctgcacattctgccctttctacagagcgcaacatatgcgctcataattccacaaggctcactggctcctcgtgtccttataccacagctcgctatcaccagctgcctactttaggcttcgaacacctcgcttgtcacacctacaggctacaaccag

SEQ ID NO: 1473 - DNA, 331 bp, Lilium asiatic
aattgctagcattgaatgttcaaatatatataaagatgcacaggtcagactacgcagaaagacagctgaagctaatgcaacaaatagatgaagatcatacattgacacaacttgcaaatgcatggctaaacctggcagtgggtggttctaagattcaggaagcgtatcttatatttcaagatttctctgagaagtatccgataactgggatgattctaaatggaaaggcggtctgttgtatgcacatgggacggtttgatgaagcagaatctcttttgcttgttgctctgaacaaggattcgaaggacgcctttactttggccaatataat

SEQ ID NO: 1474 - DNA, 424 bp, Lilium asiatic
tcagctttcaactgtgatatcagttttcacacagattacatctgagctttgtctatgtcaattgatgtaaggcataagtagttgtcctccgtgctgagagaggagagatcttactcaggattctggagcttatccattcagcacgcaataacgccaactgcgagaggtatatttaaacattttacaagtatttattttatttaatatgcaagtggtatattcaaacattttagaagaatttatgttacttaatatatctgaattctgaaagcataccgaacttaccatattcacttaaatttcttgacgaatcgacttatcaatttgaattgagagcttattgctggtctaactggctagttgtttatacttggtgttaatatttcattttgttgtagtttcttagctttttccttaagattat

SEQ ID NO: 1475 - DNA, 425 bp, Lilium asiatic
gtcgcttctcctcccacctcaagatcggaatcgtcgggctaccgaatgtcggcaaatcaacgcttttcaacacgctcacgaagctctcgattcccgccgagaacttcccgttctgcaccatcgagcccaacgaggctcggatcacggtccccgatgagcggttcgattggctctgccagctttacaagccgaagagcgaggtagcagcatttctcgagatacatgatatagccggtcttgttcgaggggcccatcaagggcagggtctgggaaacagcttcttgtcacacattcgagctgttgatggaattttccatgtgttaagagcatttgaagacccagatattattcatgttgatgatattgtagatcctgttagggatcttgaagtcataacagaagaactgcgacttaaggatctggag

SEQ ID NO: 1476 - DNA, 204 bp, Lilium asiatic
ctaacaccttttataaacactccactcttaattaaaaattatctactatacttcaatcacagcgaaaatagttataccttctttcaacttcttcctatcaaataaacaaaacataatccttcattattttaaattgctcacaatttcctatttccattatactcacatattccttaataccaaatatttttctattattctttt

SEQ ID NO: 1477 - DNA, 440 bp, Lilium asiatic
tcttacttttccaaaagatcaatgagtctcctaggaagatgcaaaagtcattagtggattttcttgtggtaggacgccaacccaatcgacattagtataaacacggagctcaaagtcgtgaagtagccagaaataatagagaatgagtgatagtgcctcataaatatctcaggatctggagaagagcaacatagtgatcaatatgtggagtaacaacaaactgagtcacaatgctgactgtgtgatatatgtctggcctggtgatatagagatagacaagctggccgacaaggtgtctgtagcgagtaggatctgtaagaggttcaccatcagtcagcctcagctttacattctgctataggagagtatccacgatcttctcatcatatatgtcaagccggtctggaataacataaatgtaattctgttgagagagaata

SEQ ID NO: 1478 - DNA, 223 bp, Lilium asiatic
gttttcccagctttgcactcgtcaacaaagccaccggcctggctatcaagcactccattggagcatctgaccctgttcgcttggtaccctacaaccctgactacctcgacgagtcgggcctatggtcggagagcaatgacactggtgctgtttatcgatacaacagaatggtgaacaacatacggctaaacttggatgctatttcatgtgggcacaacagcat

SEQ ID NO: 1479 - DNA, 434 bp, Lilium asiatic
atctcttgtagctttctcttctttggtaacgatgtcttcttgctgtggtggagggtgtagggtgcgggtcttactgcaagtgtggcagtaggatgcaatggacgtggtatgcatcctgactcgcctgacgtgagcactgactataccactatgatcatgctggctgatcttgccaacgacgattatgagcagtatttacctttggcgcatttgttggcacaaaacatcatggcacaacatctacaacaactcgtgctagcaaacctagctgcctactcttagcaacaacagcttttgccattcaaccaactagctgcattgaactctgctgcttatttgtagcaacaacaactactaccattcagtcagcttgctgctgcctacccccggcaatttctttcattcaaccaactggcagtattgaactcttatgc

SEQ ID NO: 1480 - DNA, 455 bp, Lilium asiatic
gaagacccacccgacccactcatccttataattatacactacattatctaacaaattatctcatcattcattttaccttgattaggggagttcctccaacaatcatcatccctattacacacttttacctttattgcttttattgccacataacataatgacacatcaacttcatcatctcttactatcaaaccttgctttctactctcatcaacatcaatttcctttgttacattccatatcacaaaacattatgtcacaacaactacaacaactcctgctagcaaaccttgtttcctactctcatcaacaacatctttctgccatttaaccaactatctgcattgaactctgctgcttatttgctgtatcaacaactactaccatttcattcatctagcttttgcctaccctcttctatttcttccatttaaccaactgtcatcatttaactc

SEQ ID NO: 1481 - DNA, 434 bp, Lilium asiatic
aaagaagaagaatggacttctcaacgaacgaacctttgttcacaaattgtacccgggatttaattgctactgttgactacatattctacactgctgattcattgactgtggaatcactgttggagcttttggatgaggaaagtttgcgtaaaaacacagcacttccctctcctgaatggtcatctgatcatatagcacttttggcagaattccggtgcaagcctagatccaaacgttaatacccgtggccaattgttacattttaacatgctcctgtgagaaagtagtagttttcggcaacaacttccatctttgagtttggcaactgtttgttggtgtggtccgtcattctcaaagtgctccctggtctactgtatcttgttgctatctcatagtagaataattctaatatgatcatgaaaatgattcacgtt

SEQ ID NO: 1482 - DNA, 206 bp, Lilium asiatic
ggtcgcgtgggtgcatcccgtctgttgtcccgtgcgactgttagagtttaaagttacatacaaatagtttttgtagtctctgccttcactctcatgctttcggttataaccaattttctcttagctccttccactttgaaaagcctgttcctcttattcggagtatgaattcaacactttttcctatgttccattttatctttttt

SEQ ID NO: 1483 - DNA, 266 bp, Lilium asiatic
acgcggccgggtcttcagaccattaactttatctactccatagcgcagtataaccccatcgacaccatgggggtgttgctcgttttcctcgctctcctggctctctctgctagcgccacctccacgcatacaagcggtggttgctgttgtcaaccaccgtctccggtttatttacctccgccggtgcattttccacctacatttcacctgcctccttcggatcattctccaccgtctttccacctttcgccttcgatccaccttcc

SEQ ID NO: 1484 - DNA, 418 bp, Lilium asiatic
ggcattcttcgctgcaaatgctgctgctctggcctcaaggaagtcttctcctagggtgaggaatgaagaagtgcagaaagatgctgctgctttgaagggatcagaccaccgccgtgctaccaacgtgagtgctagattggatgctcaacagaagaaactgaaccttccaattcttccaactaccaccatcggttcattccctcagaccgtcgaactccgaagagtccgaagggagtacaaagccatcaagatcaccgaggaggagtatgtgagtgccatcaaggaggaaatcagcaaagttgtcaagcttcaggaagaacttgacattgatgtcctcgtccatggagaacccgagagaaatgatatggttgagtacttcggtgagcaattgtccggttttgccttcacgggtaatggg

SEQ ID NO: 1485 - DNA, 402 bp, Lilium asiatic
ggcattcttcgctgcaaatgctgctgctctgtcctcaaggaagtcttctcctagggtggggaatgaagaagtgcagaaagatgctgctgctttgaagggatcagaccaccgccgtgctaccaacgtgagtgctagattggatgctcaacagaagaaactgaaccttccaattcttccaactaccaccatcggttcattccctcagaccgtcgaactccgaagagtccgaagggagtacaaagccaacatgatcaccgaggaggagtatgtgagtgccatcaaggaggaaatcatcaaagttgtcaagcttcaggaagaacttgacattgatgtcctctgtcatggagaacccgagagaaatgatatggatgagtactttggtgagcatttgtccgcgtttgc

SEQ ID NO: 1486 - DNA, 64 bp, Lilium asiatic
  modified_base (1)..(1): a, c, g, t, unknown, or other
naaaaaaaaaaaaaaaaaaaaaaaaaaaattttaaaaaattttttaaaaaaaaaaaaaaaaagg

SEQ ID NO: 1487 - DNA, 430 bp, Lilium asiatic
gggtgctgaagaatgattttgtcaaatatgctcatgacgaagaggcagttgatgaccaagaggagactggatggaaatatattcatggtgatgtcttcaggtacccaaagaacaattcattatttgcagcctgtctcggttctggaactcaactatttacacttacaattttcatttttgttcttgcactggtcggagtattttatccgtacaaccgaggagcccttttcactgcactggttgtcatatatgctctcacgtcaggtatagcaggatacaccgctacgtgcttctattgccaacttgaaggaacgaactgggtgaggaatcttctgttaacaggatgcttattttgtggccctctgttcttgacattctgtttcctgaacactgttgctattgcatatagtgctactgcagcattgccttt

SEQ ID NO: 1488 - DNA, 369 bp, Lilium asiatic
cggacgcgtgggtgaagctcctgacacagagacgggggacattgttttcatgttgcaactgaaggaacaccctaagttcaagcgaaaatctgatgatctctttgtggagcacaccttaacactgaccgaggctctttgtggattccagtttgctctcactcatcttgatggccgacagttgttgattaagtccaacctgggtgaagttgttaagcctggtcagtacaaagcgatcaatgatgaatgcatgcctcactaccagaggcccttcatgaagggccacctctacatccacttcaatgtatactttcctgaatcccgtgttcttacttcggataaatgttctgcgttggataccattttgccgtc

SEQ ID NO: 1489 - DNA, 399 bp, Lilium asiatic
gttgactgatcaggctgtgatggaagacaaatgtgcttcagccccaatttgctttgtagctgttcttcgggatatattggattcaaaagcagaaggaagaaacaagtacctagacatgttgatgtcagttgctgagaaattcaaaaggagcccgtacagctatgtgtgggccgcggcagggaagcaggctgatctcgaaaatcaggttggtgttggtggttatggttatccggcgctggttgctcttaatgtgaagaaaggtgcatatgccccacttcgaagtgcttttgaactggaccagatcaccgagtttgtgaaggaggcaagtcgcggtggcaagggaaacctgccactaagcaatgtttccacaatcgtcggaacctaaccggtggacgggaa

SEQ ID NO: 1490 - DNA, 454 bp, Lilium asiatic
  modified_base (51)..(51): a, c, g, t, unknown, or other
gacccactcttatctaattacttaaattttccatttttcagctttttttancccttcctctcttacgtaaatagaaaattttaacaatttataatatcattaacttttactctattatatatcgttatttatttcaattttattacattttctaattaaacttaacatccattatttaaacttacaaatattatactcatcatttttaacaacattaatttattaatttattttctcatactattttttcaacaatcctattaattatattctttttctcttaatattttttttattacttatatttcattattttattcattatttttcttttctatatattcctttatcttcatttttatattattcattattcataatttttatactttatcttattatttattatattacttcttaataatttatattcatatattatatattttatatt

SEQ ID NO: 1491 - DNA, 401 bp, Lilium asiatic
gaattacgtaaaggggccattgagcagctttaaagagcccggtctcgcttacgtaaaggggaaattgtagcggatgagtatcgaatgaatggatactctgatatagagcgggaaaaagtcaatttaattaatgttactagtgagagtttggaacgattagaaaattacaaaaatgaaacccttcattttgaacaacaaagagcgattaatcaggttcgacaactagtttttcaacaagccttacaaagagctctaggaactcttaataattgcttgaataacgagttacatttacttaccataagtgccaatattaacaccctcgttgccatgtattaaattacgtattatcctttcgacttttacttttaattagagtttaagctatatctttttatctt

SEQ ID NO: 1492 - DNA, 420 bp, Lilium asiatic
gttcagtactgcatcctttttcgagtctaattatggaagtgcatcattctctacatttgcaactggaggctctaacaatggtagtcctcccttttcattgtttggcaatcctgcatcagatgccactaagaatggggggatggctaccataactccgatgcatgatgtgcctattgagaccggtgaagagaacgagaaggcagtatttacttctgacgcggtattgtacgagtatttagatggagggtggaaagaacgtggaaagggtgaactcaaagtgaacatctctatatctgataccgagaaagcaaggcttgttatgagggctcggcgtaactataggctgatcttgaatgcaagtctgtatgctgatatgacactcacgaatatggataaaaagggcgtcacttttgcttgtgt

SEQ ID NO: 1493 - DNA, 219 bp, Lilium asiatic
acccacgcgtgcggtattaataatcttttttgaagacaattttcttttcctcaatctttcattagcgactcttccgtacatctttgattcaaaacccttttcaataaacaactaccttgacttatatacctctaataatgggaaaatcaataccataactctcagttatgatttgcctattgaaaccaatcaagataacctcaaatataaatttacttt

SEQ ID NO: 1494 - DNA, 441 bp, Lilium asiatic
catgtcgagaatgtactgcctgatcatgttgttggtgatgagaagagggttttccatgtgatactgcagatggtgagtaatctgttgaatggatgtgatgatggttatatgacattccgggtgcgtagcaatgaggaaatagaagatcgacatggacagagaccgttgccgtggaaatcaaattcttcagatgggtattgttgcgtaaagttcgaagttgggattaagagatcacagtcttgtgagttgagatcatcggatcagcttcctagaagacctaatagtgaaggctttgatctgggtctcagcttcagcatgtgtagaaagcttgtgcagctaatgcgaggaaacatctgggcagtgccaaactcccacggaccagtcgaaagcatgacattggtccttcaatttcaatcctgtctcggttccgaaacaagagga

SEQ ID NO: 1495 - DNA, 388 bp, Lilium asiatic
aggaagagtatgaagtgaatgatgagatgggaaggctttattgtgggcatagctaccatacatactgtatcaagcaatggcttcttcagaaaaatgcttgtcctgtctgcaagtcggtggcgagcaaaggttagattagatattgtggcgcattcattctcttttatgtgtacagtttctgctctgatctgcatacatcaattcttttggcttgtaagtatttctgatgaaaaatcatggatcaaaatgttggttcttggtcatgttggctgttaagctttatttagccgtgttgattgttaaaagttaagctgtgatatactgtgtcttttgggatctgtctcttcgtatgtctgaaaaattagttcagtccaacactgaatgatat

SEQ ID NO: 1496 - DNA, 120 bp, Lilium asiatic
aggaaaattataacatgaatattttcgatagtataccaacattgtccgcctaggtaccataggtgacttatatcaagcagatgcctgtcttcaagaaaaatgctctgaccacgcactgca

SEQ ID NO: 1497 - DNA, 421 bp, Lilium asiatic
cagacgcttggtgctcctctaataccgattagttctccacccaattgcaccagtagaatcggcctcatcccccgaccatttatccccaatcgattgtgaacttgatcgagcatatacagagatctgcatcaattccttgacagccagatcgacgaagttcaactgattcacctattcttcgatcgacactcttctatctaatctcctttatctgtatgttatcttatcttcgatcctaattcgtttcttgttttggatttcaggtactggatgcatgaagcattgcagttgtgaggaaggagctccggtagccatggatcgtgcgagagatagagcatcgaagatgaagaaatgatggctgcatagctttaaagctgagagtttccttgacagtcaaggtttaacacatgagtggcgcggg

SEQ ID NO: 1498 - DNA, 299 bp, Lilium asiatic
  modified_base (13)..(13): a, c, g, t, unknown, or other
  modified_base (22)..(22): a, c, g, t, unknown, or other
acaaagaaccttnctaaccatnatctttccaaattataacacaactttccacatgagactaatcgatggttattcacctccttaattcctcaaaagattgttaattaacactaccacttcctgagcaatgagagtaatataacatcgacatgttcaaagacccttacctgatacatacactatttcatatacacttcattacctaaacccctaaatttgtatgaaataatatcaacaatcttaataccaatattacctcttaattttacaacacaacctactcgtataacattagatac

SEQ ID NO: 1499 - DNA, 407 bp, Lilium asiatic
gaattacgtaaaggggccattgagcagcttgaaagagcccgggctcgcttacgtaaagtggaaattgaagcggatgagtatcgaatgaatggatactctgatatagagcgggaaaaagtcaatttaattaatgttactagtgagagtttggaacgattagaaaattacaaaaatgaaacccttcattttgaacaacaaagagcgattaatcaggttcgacaacgagttttccaacaagccttacaaagagctctaggaactcttaatagttgtttgaataacgagttacatttacgtaccataagtgccaatattaacaccctcggggccatggaaaaaataacggattagcctttcgacttttacttttagttagagtttaggcattatttttttcctttgcttcc

SEQ ID NO: 1500 - DNA, 341 bp, Lilium asiatic
cggacgcgtgggccggctactccacccctcactccggcgtgcgccctcgcccccctccccggtgcctcgtgcaaaattcccagcggctctgagtcaagaagaaagatgactaataagaatccccttgtgtttctggacatatcaattgatggaaaacctgcagaaagaatgaatattgagctatatccagatattgttccgaagaccgtggagaattttcgagcactgtgtaccggcgagaaaggcattggagtttctactggaaagccattgcattacaaaaggatcaaccttttcatcgtgtactcaaaaggatttgttgcccaaggtggcccattttt

SEQ ID NO: 1501 - DNA, 428 bp, Lilium asiatic
gtcgcgggccacatatcccaaacacgtcatttgtaaaagcatttacttgcttaaaggctgcatcatcctattggaggggcagtgcagatagggaaagcctgcaaagagtttatggtatttcctttcttgacaaaaaacgtctcaaggaacatatgaccatgttagaggaagcaaaaaaatatgaccacagaatgttgggacagaaccaagagcttttcttttttcacccactcagtcctggtagttgtttcttcctaccacatggatcgagaatttataataagttaatggagttcatgcgagcagaatattggaagagaggctaccaagaggtcatgacaccaaatatgtacaatatgcaattatgggaaacttcaggacatgctgcaaattacaaagaaaacatgtttgtatttgaggtagaaaaa

SEQ ID NO: 1502 - DNA, 427 bp, Lilium asiatic
gtcgcggtccacatatcccaaacacgtcatttgtaaaagcatttacttgcttaaaggcttgatcatcctattggaggggcagtgcagatagggaaagcctgcaaagagtttatggtatttcctttcttgacaaaaaacgtctcaaggaacatatgaccatgttagaggaagcaaaaaaatatgaccacagaatgttgggacagaaccaagagcttttcttttttcacccactcagtcctggtagttgtttcttcctaccacatggatcgagaatttataattaagtaatggagttcatgcgagcagaatattggaagagaggctaccaagaggtcatgacaccaaatatgtacaattatgcaattatgggaaacttcaggacatgctgcatattacaaagaaaacatgtttgtatttgaggtagaaa

SEQ ID NO: 1503 - DNA, 429 bp, Lilium asiatic
gaagaactatgacccccagaaagacaagcgtttcagtggctctgtgaagttgccgcatagtccccgtccgaagatgaaggtctgcatgctcggagatgctcagcatgttgaggaggctgagaagattgggctggactacatggatgttgaagggttgaagaagatgaataagaacaagaagctggtcaagaagcttgcaaagaagtatcatgctttccttgcatctgaggccatcatcaagcagattccacgtcttcttggcccgggtcttaacaaggcagggaagttccctacactggtgactcatcaagaatctcttgagtcaaaggtgaatgagaccaaagcaatggttaagttccagctgaagaaagttctttgcatgggtgttgcagtagggaatcttggaatggaagacaagcagatctttca

SEQ ID NO: 1504 - DNA, 343 bp, Lilium asiatic
gcgcgtactcattatccaccttcttcacccctttttcctactatccccctctcccccctacccggttcctcagacaaaattcccagcctctcttattcaatattaattattactaacaagaatccccttttttttcttttcatattaattgatttaaaacctgtacaaataatttatattgatctatatccacatatttttccaaatactctttatatattttaatctctgtttaccttctataatgccattttattttttactttaaatccatttctttacatattatcaactttttattctttactccatatattttttcctccaatctttatctaatttt

SEQ ID NO: 1505 - DNA, 362 bp, Lilium asiatic
aaacttcctaataatcgggaccaggactagcttgggggtttctagagaagaagatgtgaaatctctaaggctcgattggcacagaggctaggtaagtttggcataagacaactatgagaaggtccatgtcggctctgcagagaacaatggtaacaactatacagtcggctacaagctctaggatgcaactagtgtggctctaggggactatgaagataatttactactgtggcttagggctacaagggacaagttagagtagctatgggacaactgaaagtcagttctggagatgacaagctcggctttagggtaagctacaagcatgattaggcaagcctgagctagtaatggtaatgata

SEQ ID NO: 1506 - DNA, 429 bp, Lilium asiatic
tgcttctttactcgtcacttggagatgctgaaggaataacgaaacttgcatctcttgcgaaagagcaagggaaaaacaatgtggccttcctttgtctttttatgttaggtaaattagaggactgccttcagctgctgatagccagcaaccgcataccagaagcagcactgatggcacgttcttatcttccaagtaaagtctccgaggtcgtaggaatctggaaaaatgatctcaataagataaaccagaaagctgcagagtctttggctgatcctgaagagtaccctaatttgtttgataactgggaggttgctcttgcagttgagtctagtcttgcccataaaagggacagctattctcctgccgaggaatacttaagctatgcggaaaagttccatgttaatctcgtggaagcttttaggagcatgc

SEQ ID NO: 1507 - DNA, 441 bp, Lilium asiatic
gcccaccgagcaacggaaaacactcggagaagaagaagaagaagaggaaggacaaggaatcggatgcggcggctccggacggtgcggcggaggaagcggctggggaggtggaggcactcggcgtggcggtgtcggggaacaatatcaaggacgctaagtacgccacgctgagctcgtttgccgcggccgggcttccggcggaggtgatggattgctgcaagaagttcagtaagccgtcgccaatacaggcgcagtcgtggccgtttctgcttgacgggcgagacttgattgggatcgccgcaaccggctctgggaaaactctggcatttggagtcccggcgctggtgcatatactgaagaagaagaaggagaacaatacacagaagaaagctgttccacgctgccttgtgctctcacctactagagagttggcccaacaaa

SEQ ID NO: 1508 - DNA, 82 bp, Lilium asiatic
cgtacgaccggaactaatcacactaagcaattagcactgcttacaacataacaacaatcgggattgcagggaagcaatcctt

SEQ ID NO: 1509 - DNA, 428 bp, Lilium asiatic
gccacatctacttcatagaaatttgagatcgaacaacattcttcttggtgaggattttgaaccgaagatcactggatttggaattgatcggatcattggggaggcctcttatcgatcgatggtgggttccgaattgagttcctgctgctacatggctccagagcatggctgcagtgcaaaagcaacagaacaaatggatgtgtacagcttcggtgtcgtgttactcgagctggtcactggcaggcaagctgagcagctggattcaagagagtcggttgatgtcgtgacttgcgtgcggaggaaaataaatgtcggtaatggatcctctcatatactcgacccaaagatccccagctcatcccagaaagagatgctcgatgtgctagagcttgctcttcaatgcacttctgttatgcccgagaaaagac

SEQ ID NO: 1510 - DNA, 321 bp, Lilium asiatic
tcggccacatctacttcatagaaatttgagatcgaacaacattcttcttggtgaggattttgagccgaagatcactggatttggaattgatcggatcattggggaggcctcttatcgatcgatggtgggttccgaattgagttcctgctgctacatggctccagagcatggctgcagtgcaaaagcaacagaacaaatggatgtgtacagcttctgtgtcgtgttactcgagctggtcactggcaggcatgctgagctgctggattcaagagagtcggttgatgtcttgacttgtgtgctgaggaaaattaatgtcttata

SEQ ID NO: 1511 - DNA, 176 bp, Lilium asiatic
gtcgaccctacatcatcttgtgtcgctctttttggacaagcttcatctaatggaagatggccttgaggatcaagacatgaaagattctttggacgaccggcatctcgattctaacgagatttcgcatgaaatgactacgttcctcatgagaattgttgctattttatagtcatcta

SEQ ID NO: 1512 - DNA, 393 bp, Lilium asiatic
ataacacaagaaatagaagagaaagaaactatcggtcccattatgcaaaggcatctaatagagttcaagttcaggcatgtgtacgatgtaacaaagacgttggatagtgtcaaccgtccaaatggatcggtgacacgagtaatgatgccacactgcgtgatggttagagtcgactcatccgcaatatggataaaaggaagatgagtacaaacacctatagtagtaagcaatgcggtatcacatgtgatatgatatgaagaaccaaagtcaaagatacaaggagcgggtgtaccagacgataaagcagaaccttgcggagtaccaacgacaaagcccaaggagcttgaaccgagtctagagaaattggagggctgaggtgtaatgattgttgca

SEQ ID NO: 1513 - DNA, 245 bp, Lilium asiatic
  modified_base (1)..(1): a, c, g, t, unknown, or other
naactagcaacataaaaagcactctttcgcatcatcaatagcagtcaaattatggtgatgggttatgctccttgctctttctccaaatactcttaccttatccattctcccacaatgatcacaagctcctataacttccctacacttcctattcctttgagtagagttatcttcaatgtgtgtaaacccaatagttcaaccctacaccatccaacaggcaatcgcaacatgcatcttactattat

SEQ ID NO: 1514 - DNA, 268 bp, Lilium asiatic
ggaagacccaggccgacgcacgcgtacgaaatttgcgacatagaaagtactacttcccattatgcataggcatctaatagaggtgatgtgtaggcatgtttacgatgtaacaaagactttgtatcgtgtcaaccgtccaaatggatcggagacactagtaatgatgccacactgcgtgatggtttgagtagactcatcctcaatgtgggtaaacggaagatttgtacacacacttatagtagtgagcaatgcggcattcaatttaata

SEQ ID NO: 1515 - DNA, 421 bp, Lilium asiatic
catctatcaccataaaaagcacactactgtttcaacaatggcagtcacaatagtgcgcttggcgtatgctacttggtctttctgcaagtcttactacctcaaccattttcccacaatgctcacaagctcttataacttccctctttcccccataccttttatcagcggtgtcttcaatgtgtgaaaacccaattgtttaaccctacaagatccaacaggcaatatcaacattcatcttactattatcaccctcgttccttcaacaaccgtcaaccttattacagcatttacctttcatccatttggtggcacaatacattagttcacaacacctacaacatcttgagctagcaaacctttctgcatactctcagcagcatcatattttttacattcaaccaactgtcttcaattaactttg

SEQ ID NO: 1516 - DNA, 241 bp, Lilium asiatic
cggacgcgtgggcggacgcgtggagaaattcatttgcctcatacccgaaatctattttagcagttgacgggacctcaaatctcatctagctcttccccattaattgtaatgcacaatctttgagagggtgagtcatttgtaggttgccgcaacatggtgtatgcactgtgctgtattccgaagtatgagttaagggaagatgatctctaactactttggtagtgagacacgcggtctcaca

SEQ ID NO: 1517 - DNA, 103 bp, Lilium asiatic
ctccaagagtgcctgccccagatgttaacttgttccaggaagttaaagaggcactgagagggcaaattgaagtgcaaagaagactttatgaacaagtataggt

SEQ ID NO: 1518 - DNA, 425 bp, Lilium asiatic
atcagatagggtcagtgaccgagagtattgtagctgtgaaaatgtccaaacgtgccggggggtgtgtgatgaccagccaccgcagtggtgaaacggaggttaccttcattgttgttcttgccgtcggtttttaaacaggccaattaaagactggagctcattgccgttggaaccgtttgcaaaattttataaaacgtgcttaaatggagaaggcgctggtttctgggcatctattgtctgggccaatttaatagcacccgttaggccatactagagggtaggcttttatgagcatcgtatatatgagtgtcgagatgagctgcaaagttttgttagtttgaactatgtattcaggttactcaagagggatataaaataagatgtagcgctgtacgctaaactggtagcttgtataatgttgtgag

SEQ ID NO: 1519 - DNA, 424 bp, Lilium asiatic
  modified_base (18)..(18): a, c, g, t, unknown, or other
gcgggaatgtttcttttnttgaatatcctgcaagagccatactgccatactcacaggcacttgagaaatttaggccccatatccaacaggttagcatggaaagtaatggaaagcgtgtaactattgatggtgccccgcttcccttcgaggccggtgaaatagattttggagaacctggaacaaatggtcagcatagcttttaccagctaattcatcagggaagggttattccatgcgacttcattggtgttgtgaaaactcagcatcctgtttatttacaaggggagatagtgagttaccatgatgagctcatgttaaacttcttttgcacagccagatgctcttgcttttggaaagactgccaagaaatcgctcaagtgagaaagttcccaacccacctgatttccttacaagacttttttca

SEQ ID NO: 1520 - DNA, 289 bp, Lilium asiatic
ataacacaagaaatagaagagaaagaaactatctgtcccattatgcaaaggcatctaatagagttcaagggcaggcatgtgtacgatgtaacaaagacgttggatagtgtcaaccgtccaaatggatcggtgacacgagtaatgatgccacactgcgtgatggttagagtcgactcattcgcaatatggataaatggaagatgagttcaaacacctatagtagtaagcaatgcggtattacatgtgatatgatatgaagaaccaaagtctaagatacaaggagcgggtg

SEQ ID NO: 1521 - DNA, 253 bp, Lilium asiatic
gggacgacccacgcggacgctaacacacgaaatagaagagaaagaaactatcggtcccattatgcaaaggcatctaatagaggtcaagtggaggcatgtgtacgatgtaacaaagacgttggatagtgtcaaccgtccaaatggatcggtgacacgagtaatgatgccacactgcgtgatggttagagtcgacttatccgcaatatggatataaggaagatgagtacaaacacctatagtagttagcaatgcg

SEQ ID NO: 1522 - DNA, 197 bp, Lilium asiatic
tcgcaattacttacataacatctaacatctgcttcttactcttaatcacactccttattaataggaagatttatactatcaattctagctatcaatctcacaaaccctacttcctttgacaaaacaagcatctacacattaacatctgatcatttactttactactacgtacacttacaaataaatacacctaaatt

SEQ ID NO: 1523 - DNA, 280 bp, Lilium asiatic
acccacgcgggcgataacacaagaaatagaagagaaagaaactatcggtcccattatgcaaaggcatctaatagagttcaaggggaggcatgtgtacgatgtaacaaagacgttggatagtgtcaaccgtccaaatggatcggtgacacgagtaatgatgccacactgcgtgatggttagagtcgactcattcgtattatggataaaaggaagatgagtacaaacacctatagttgtaagcaatgcggtattacatgtgatatgatatgaagaaccaaag

SEQ ID NO: 1524 - DNA, 348 bp, Lilium asiatic
aaggcccataaatctgatgttcactgtgttgattggaaccggcatgatgagaatctcattgtaactgggtctgctgataattctgttcgcatgtttgaccgccgcaacctcacttctggcggtgttggatcacccgtacacaaatttgaagctcataatgctgctgttctctgtgtgcagtggtgtcctgacaaggcgtcagtttttggaagttctgctgaagatggctttctcaatatttgggatcatgagaaggttggtaagaagaaagaaagggcaacaacgaggatggctgctaattcaattcctggtttattcttccaacatgcggtacacagggacaaggtg

SEQ ID NO: 1525 - DNA, 411 bp, Lilium asiatic
gaactttttgcaaaataagaaagaacgtcaacgttcgaaatccgtgtatgatcagtcagatgttgtcgggtcatcatctgaggaaggatatgttggactatcgaagaaaggtcatttatttgccagattctcagcaggctcacttgacagtgatggtggcaagaaatggagttccatgcatgaatcgacccgagatatttcaatcgaacatgtatcttctgatgaaatccagcagcagtctaatgaaaattttgacagcgaggttggtcttagtggcacgaaactaaatggctttgctactgatgtttcggacagcgttggaatactgaccaatctcccaaagaaggcagataatatcactgagaactctgtagcacctcttcgtctagaaattgatggattgttgagtgt

SEQ ID NO: 1526 - DNA, 432 bp, Lilium asiatic
ctagcaagcggatggataaccccagtcataattcagtttctgaagaaaatagctgtgaagggaatatacgtaacctttgctgtgaggaatacatagaacataagcagtgtgcttctaactgtatgacagagactggtaaaagcatggttctagaggtccttgctactactactgctagtgagaaagatgccttgttggctcatgaagctggaagttttcctaatggagtcctatgtgattatgatcttgaggaacaaccatctggtttcaatgtgtctgctgatgaggatgaaactgtgtctgctgacgaggatgaaacagtcgattccgaggagtctggggcatgccaagagttttctcagtctatttcagtagatcctaatttaaaggacttgagaagatgtgtgacgtttcctcgctcagcagagttgc

SEQ ID NO: 1527 - DNA, 436 bp, Lilium asiatic
caaaaggcccaccctccgccacgtcacttcacgactccttcccatttctggtcacctccacacccgccggcatcaccctgcctctcatcagatcccatttccaggagaagcaaagcgatggacgccgagcgagttctctggccggcgtcgttcatggcagggatcctcatgtgcaagacggtctatgaaatcactcggttggtcagctcgcggtattttaagggatataacagtctgaacaactcacagaaaattgagtggaataacaggggtttctcaacatttcacgcaattctagttgcggtagtttctttttatttgctagtggtatcagatcttttcaaggatggtgcacggcatgatcggatgatagagagaaagtcgatgctgtcagatgccatatttgggggttcctggtggcttttttctctcagac

SEQ ID NO: 1528 - DNA, 434 bp, Lilium asiatic
caaatgttgtgtttatgggaatgggtgagccaatgttgaacctgaagtcagtactggaagcacaccgatgcttgaacaaggatattgaaattgggcaaaggatgatgacaatatctacagtgggagttccaaacacaatcaagatgttggcatcacacaaactccaatcaacattggctgtcagcttgcatgcgccaaaccagaatctccgtgaagcaattgttcccagtgctaagtcctatcctttgaacgctattatggaggactgcagagactattttctccaaactggacgcagagtgtcttttgagtatacgcttttagctggggtcaatgatgcacaggagcatgctgttgaactggcagagttgctccatcggtgtggcggcggttaccatgttaatttgataccattcaatccaattgatggatct

SEQ ID NO: 1529 - DNA, 408 bp, Lilium asiatic
ggatgatgggcttcatcgatgatgattcgtgaagggatgcttgtgtggccaaagggtttcttggagagtgtagaatttcagctcggagtggagaaatgggtgagggcggagttcttaaggtgatgattgtgaaaggtaagcggctggcgattcgggatttcaagagcagcgatccttatgttgtgatcagggtagcaaatcagactgcaaagacaaaggtcatcaacagctgcctcaatcctgtttggaatgaagagttcacttttctcgtcaaagaacctcttgattacttaagactggaggtgtttgatcgagacaggttcaagtctgatgacaagatgggcaatgccaccgttaaccttcaacccatcaccttagctgttgagctgaaaagagcactgcagctct

SEQ ID NO: 1530 - DNA, 408 bp, Lilium asiatic
gcggaagaaatcgagagctgattctaatccggttaaagatggttcaggtacttggttgctatcaagtggacgaggcaactgtagctatcaaagaagctttcggtaagtttgatgacgtgcttgagccaggatgccactttttgccatggtgtttagggagaaatgtggctggttatctttcgctgcgcgtgcagcagcttgatgttcgctgtgaaacaaaaaccaaggacaatgtgtttgtcacttgttgtgcatctatccaataccgtgcccttggtgagaaggcatcttatgctttctataagcttagcatcacaaaggggcaaattcagtcctatgttttcgatgttattcgggctagtgtgccaaagctcaacttatatgtattctttttgcagaatatcgatt

SEQ ID NO: 1531 - DNA, 429 bp, Lilium asiatic
ttcaggaccacgtccccaactccacccagctcgtcggcttcctcaccctcctcatctccgggggtatgtctcctcctcctcaccggtctcaccgccacctctgctgccatggggtttgtcctttttgcgccgctgatactgctgaccagcccggtgtggatcccggtggtgaccatcttcttccttctcactgctggctttctgtcgacttgcgggttcggcgtggcggcgctggcgggcgggacctggctgtacaggtacttgagcgggcggcacccgctggggtcggagagggtggactatgctcggagccggattgcggatactgcgagccatgtgaaggattatgcgagggagtatggggggtatctgcagagcagggtgaaggatgccgcccctggggcctgaatgaggagcttgttctatcta

SEQ ID NO: 1532 - DNA, 298 bp, Lilium asiatic
tcgtaattacgtaaaggtgccattgttcatcttttaagagcccgggctcgcttacggaaaggtgaagattgtatcggatgagtatccaattaatggatactcttatatagagcgggaaaaagtcaatttaattaatgttactagtgagagttttgatcgattagaaaattacaaaaatgtaacccttcattttgaacaacatagagcgatttattaggttcgacaacgagtttttcaacaagccttacaaatatgcttaggtactcttaataactgttataataacgagtgactttta

SEQ ID NO: 1533 - DNA, 155 bp, Lilium asiatic
tctcaagtaccataatagcacctatctcctcatctctcaactccccttccatctcctcttccgttatatcggcccactcttcatatcctttcctctctttcaaaaattcttttataattttatattattctcctttttccaaaaaatcttttata

SEQ ID NO: 1534 - DNA, 433 bp, Lilium asiatic
gtttgtggagtgcatgttacaacttaagagagatgaaatctgggaatctattggtagcgcattgctggccaaggtggtagatctgctcactgaccttgatgtaaacataagctgggaagccattctacaagaagagcataacaaaggcgtctttgacatggatcttgaagatgctgaggagaatgcggacggctttggtttaaaggattccgaagatactggagttttcaaggataatgcttttgctgacaagttggatggtttgatggtgatcatctgcgaacatctcaaatcttgtgcttttgatggctgtttgggaaaagtatttgaaacacttatggaatccttcaggagaactctgatgaatgctcacaagtcaaaatttgctcacgttgtgatgttctatgcatgttcactggatcctgaaaagact

SEQ ID NO: 1535 - DNA, 438 bp, Lilium asiatic
gttatgtgacccggagcagctccgatgccctacttctttgtgccaatggttcaacaagggcgaacaggggcctcgcccaggtggtagacgtgcaggtgttgggcctatgcagcaaccgcaacatcccgtgccaatactccagcaacagatgcttccaagggctcgtgtctaccggttccctcctggccgcaatatgcctgaagttccgatgcccggtatgctcactgttccttacgatttcggtggtatgcccctgcgggatgctggcatgcctcagtcgattcctatcggagcgttggcctcgcagctcgcaaactcaccgcctgaacagcagaggctgatgctcggagaaaatctctatccgctggtggatcagctggaacatgaccacgcggcgaaggtgactggtatgcttttggagatggatcagactgaagt

SEQ ID NO: 1536 - DNA, 442 bp, Lilium asiatic
  modified_base (44)..(44): a, c, g, t, unknown, or other
cggaaagttgctatgctgataaggccgatcccttctcagggganttccatacgatcgatggttaaggcaatgacgcatggctgcgaaaattccacattttcattatctagaagagataaattgtgacgccctcattgaacttaaactagctttccagaaagagaattcagatcagaatgtcaaacacacttttctgcccttcctcgtaaagtccctgtcaatggccttgagtaaatatcctctattaaatagctccttcaacgaagagtcctatgaagtcatcctcaaaggactccataatattggtgttgccatggctactcctaatggcttagttgtaccaaacataaagaaggttcagtctctttcaatattggagattacaaaggaattgtcacggttacagcagttggcatcaaataataagctcagttctgaagat

SEQ ID NO: 1537 - DNA, 435 bp, Lilium asiatic
gcaattcgtaaggcatgtgcttcactcgagcctaattatcaaccacctgtgacgttcattgtggttcagaagcggcaccatactcgcctgtttgctaataaccataatgataaacggactgtggacaggagtgggaatatcattcctggtactgttgttgattcaaaaatttgccacccgacagagtttgatttttacttgtgcagtcacgcagggatacagggaacgagccgtccggctcattaccatgttctctgggatgataacaatttcactgccgacacactgcagtctcttaccaataatttatgctacacttatgcaagatgcacccgctctgttttaattgtgccacctgcttattatgcacacttggctgcgttccgtgctcggctctacatgtcgcctgatacttcagatggtggctcacttgct

SEQ ID NO: 1538 - DNA, 321 bp, Lilium asiatic
tcgcgtacgctttttcagatagggacctctaggaccactttaccaagaagggataggtggctagttgtcttggggttgttgaacctcgcacacgcctctccagagggtttgcgtttgtgaccatggactccaatgatgatgctgaacgttgtatcaagcatctgaatcagtctgttctgctgggccgatacataactgttgagaagtcgaggaggaagcgcccactgtcacctacacctggaaactatcttggtgtgaaaaatgcccgtgatggatatctccccagtcgtgtttgataccgtggaggttgtggttatgttc

SEQ ID NO: 1539 - DNA, 170 bp, Lilium asiatic
  modified_base (2)..(2): a, c, g, t, unknown, or other
cnagtatattctttgacctactaccttctatagagacctgatccaagtgaacatggtcggccctattaccacaaccctgcctcttcattgggtggtgccattaacgtggaagccacctcaatttaagcaactttgactactacatcctcactggatgaggtacctttcat

SEQ ID NO: 1540 - DNA, 434 bp, Lilium asiatic
  modified_base (322)..(322): a, c, g, t, unknown, or other
  modified_base (367)..(367): a, c, g, t, unknown, or other
  modified_base (429)..(429): a, c, g, t, unknown, or other
catttaactacatatgactcaagtcccaaatctttcacagaaaacccccttataattttccattgtgctactggaaaattcctccctcactctaatatacatcttaggtacaaagtatgtacctaaagtatacgggagggtgagtgaaaatctcacaaaatattggttatgaggagtgttcaggatcaagatcagtcgtgaacataaaactgacttgaattacataaaaactgacttgaattgtaccaaagtgggtgtacaattgagatgtcgttgaaggggtccccagcattagacacacttaggcgcaaaaggtctttanggtctaggagggcctagggataccaaagcacaaaacaaaatattnttattattaattttctgcttaaacaacatcttagatattggataaccaaccgtgaacctaanataat

SEQ ID NO: 1541 - DNA, 326 bp, Lilium asiatic
cggacgcgtggggccgaattgattaccactcaagcattgttccaaggggactctgagctgcagcaacttcttcacattttcaggttactggggactccaaatgaggatgtatggcctggattgacaaaattggctaactggcatgagtttcctcaatggaaggcaaaaagcctgtcgaccgccgttcctgatctggatgctgatgggctagatctcctctctaagatgttggtctatgatcctccgaagcgaatatctgcaatgaaggctatggatcatccttactttgatgacgtgaacaaggctatctactgattttctctggc

SEQ ID NO: 1542 - DNA, 169 bp, Lilium asiatic
gtccaacaacctcgactggtacaagggtctcacccttcttgaggcccttgacttaatcaatgaggcaaagaggcccacagacaagcccctccgcctttctcttcaggatgtgtacaagattggtggcattggtactgtgccaggcgggcgtgtggagactggtatttgt

SEQ ID NO: 1543 - DNA, 297 bp, Lilium asiatic
cggacgcgtgggttaatttttaaagcctttatttgtttccggcattttacggtaaattttgtaaggtgttttttatttggatggctatttgctgacatgattttggagttttgatttcattctgtgcagcaagcaactagcagcagtttggaattcatcctcatataagttgcaacaagccttgagttcgtagagctcttagggcagtttatctgtggtaacaagcattgtaatgagaaagatgatttaggaagctacgaggtaaatttctgttacactgaagctggagaaaataaa

SEQ ID NO: 1544 - DNA, 83 bp, Lilium asiatic
cggacgcgcgggttaatttttaaagcctttattggtttacggcgactatacggcggggggggcaaagtgacattttatattgg

SEQ ID NO: 1545 - DNA, 129 bp, Lilium asiatic
tcgtggacgcgtgggatgcactctaccggattgttgctgacgaaggcgttctatcagcggtgggaaggtgcaagttccactgatgtgcgagcattgtcttataatatgggcatgcttgcttcctatgac

SEQ ID NO: 1546 - DNA, 257 bp, Lilium asiatic
gacgcactgatgacctctctgcttggagtggtatacgcccgctggccattgattcaaatgcagagaacactgagagtatttctagagaccatgttttatgtgaagattatcctggtttaatcacaatcacaggcggaaagtggaccacttacagaagcatggcggtagatgcagttgttgcatctataaaatcagccaagttgaatcctgtcaatatctgtgtgactgaccacctacatatttgtggcggagataga

SEQ ID NO: 1547 - DNA, 53 bp, Lilium asiatic
ttccaatatcaaacaaagatcacatctttttgttccactagctctatcatcaa

SEQ ID NO: 1548 - DNA, 356 bp, Lilium asiatic
gtggaactcttaagcttcaggagagaagacatattattaaaataagtctaggatccagttcctaaataaggagagtcttctaacgattctttttacacctcgtgttttagaatcaagactatcattccttggattccataatcatccacatgagatgctctaaaaatctatcttcaggcggacgcgtgggctgcagatcgcgacgtgcgggtgttccgatcaggagatccgatggaccacaacgagacaggatgccatgctcctgaagcaccgatcttctgtgtcaacaactgcggtttctttggcagtgctgccacaatgaacatgtgctccaagtgtcacaaggatcatgtcat

SEQ ID NO: 1549 - DNA, 232 bp, Lilium asiatic
cctggcgttttcttccatgtgaggcgggacttcacatattttgaggctacatcctccttctgggcggggatgaaaacccgatggaaggatctttctctgttacaaacaaattctacctctttgacttctaatagagaagaacgtcaaacattcaaataatcatattagatacagtaattatgaccacttggaccctatccagataggcgtgcgctttggtctcacgtgaata

SEQ ID NO: 1550 - DNA, 393 bp, Lilium asiatic
cggacgcgtgggaagagagtctggcgtcaagtttgagcatatctctgccccacaacctgctgatgttgctgagtcagctggatctgatgcagcgtatgctatatccaacgtctctgatagtgtgattccagttttcctgttacaagcggagcaactcttaaattcgtctggtttgccagctgtccaattacttgctaaagcacttgcaaaggccacaggttacacagatatgaagacgagatcgcttctctcatctatggagaactacgtgtctttacttctaactgcaaagaacatttatacaccatcgcttgcttttggaatcttgaagagttcatgtccgatgataaaattgaaggggtaaagggtctttctcttacagctgatggcatg

SEQ ID NO: 1551 - DNA, 344 bp, Lilium asiatic
ggagagggaagggggagagatggggttggaaggggccctcttcgtgtggctcacttccttcttgctcctcatcggcctgctcgttctcatcatctaccagcttatgtgcttggcagacctagagtttgactatatcaacccttttgattcagcttcaaggataaataaagtgatcctaccggagtttgtgttgcaaggactattatgcctcatcttcctcctgtctgggcattggttaatgtttctattttgtgtgccaaatctttactacaatgtgagactataccagcgacggcaccatcttattgatgtaacagagatttttagcctgctggacagagaaa

SEQ ID NO: 1552 - DNA, 377 bp, Lilium asiatic
  modified_base (329)..(329): a, c, g, t, unknown, or other
  modified_base (350)..(350): a, c, g, t, unknown, or other
gcagccaccgccgtcgccgggactccacttcccgcagtctccatccggatttttcccccaaatgagtccccgatggagggatatgtagctgttgcagatagattctagctctttgactacaaatagagaagaaagtcaaacattcaaattagcaaattagttacagtttttatgaagacttggaccctatctagttagtcttgtgctttggtcttgcgtgaatacgatggtcaagcatacaaggcgtgggagttcgaatgagtaaacgaggtaggtcaatcatacaagtcgtttgctgcctgtttactgatgacgtgtatgtaatcccngtgtgagatctatgtatgcanagctattcggtctatttagtttaatcg

SEQ ID NO: 1553 - DNA, 391 bp, Lilium asiatic
  modified_base (377)..(377): a, c, g, t, unknown, or other
tgggtttctcttccaggtggttgatgacattctcgatgtgacaaagtcctccgaggagttggggaagactgcagggaaggatctcgcctcggacaagacaacctatccgaagctgatgggtctcgagaagtcccgtgagttcgctgaaaaattgctccgggaagctaaggagcaccttgctggattcaacgcggagaaggcggcaccgttggttcacttggctgagtacattgcctaccgtcaaaagtagtgcatgttctggtagtgcatcaccatgcaaaacatgtgttctggtaaatgtggctttagtgtgttcttctcttgttaatggcagtcgtactggatgttagttcgtgggtctttatcatatctatctngaatatgttttaac

SEQ ID NO: 1554 - DNA, 327 bp, Lilium asiatic
acccacccgtgcgtggacgcgtgggcttcctcaatgatctgtagccactgggatggatgcatacacaggcgaatgagcttccccagctatctcctcaggatctgacggcccatgcacggattcttgagaacaacaagcagtgggatggcgagaagtgcataattttgacctgcagttttactccaggttcctgctcttttactgcatataaacttacaccaacaggttatgagtgggggcgtctaaacaaggacactggaagcaattcttatggattttcccgcacccaccaccccaaggggcaaatgctttttagtgaatgctttt

SEQ ID NO: 1555 - DNA, 277 bp, Lilium asiatic
cagtatttgggccggatccttttcggcccctaaccgaaccatcttgaagccgggatctaccgtcctccctttggaataatatatatggtcacattctggatttatatggtacacagtatggacgcgcgggtatatcctccctgtgacctactaacaatgggtccgaagcttcatgcctgtaattggggggaggattttccaaatcatgcgttttcattggtgccatctgtgagaatcgaacacatgaccaggtgggttaaagccacgtgacaagcaa

SEQ ID NO: 1556 - DNA, 398 bp, Lilium asiatic
gaaggccccagctgccaagccgaagcctgcgcccaaggctgcggcgaagccgaagccggctcctcggccggcgccaaaggctcgccctgcaaaggccgccaagacctccgccaaggacgctcccgcaaagaaggctgctgctccggcaaagaaggcaatagtcccaccaccggctaagaaggctgtgcccgcgaagaaggctgctcctgctgccactcctaagaaggccgctcctgcagcgaagaagaaggcggcgactccagcgaaggggaagtccccggcgagaaaggcacctgcaaggaaggcggccaagaagtaggcttttgattcgtgattctgatggcagctggctgtacattggctgatgtttgagggggcatgtgcgacgttggcatgcc

SEQ ID NO: 1557 - DNA, 181 bp, Lilium asiatic
cttcctttggaataatatatatggtcacattctggatttatatggtacacagtatggacgcgcgggtatatcctccctgtgacctactaacaatgggttcgaagctttatgcttgttatttgggggaggattttccaaaatcatgcgtcttcattggggccatctgggagaattgaacaca

SEQ ID NO: 1558 - DNA, 438 bp, Lilium asiatic
cggacgcgtggggtcccgcaaaggctcagataggaatattatgtggccaagaagttggagatgttgcgagcatggtttcttcttgtgcaccatccggccgtagtagccctttgtatgcaaagggagtttctcatgttgcttcccctcctcggagagaagatgataaagatgggcattatgtatttgcagtgggagaaaatttaacttcacgctataaaatttacagcaaaatgggtgaaggtactcttggtcaagttttatagtgctgggacagggatagaagagagatggtagcaattaaggttattcgaagcataaaaaagtaccgtgaagctgctatgatagaaattgatgtgctggaacagcttgggaagtttgataagaatggtagccgttgcgtgcaaatacggaattggtttgacttccgtaaccatattt

SEQ ID NO: 1559 - DNA, 395 bp, Lilium asiatic
caccacatgagagctctgctctaatgacgagcatctctcctcctccagcttccttcgacgccaagtcttcccacttccctgagagcaaacgacgacaaggacgacgacaaggacgtccacttctacctcctctcctccccaagaagcttcctttgatggcgacctcccaagaagcttccaccgtcaacctcattacctgaaggcgacctcctctacgacagcaagcttccttcatcttcaaggcgacctgagagtgacatgcagagatgttgactgcagagaagtcctccaccgtctgcatgcatcaccagtgaactccagaagactcgagaggatgaaccagagccgtcaatccaatcaaggtaagatttacttcgatttagtactaattcttt

SEQ ID NO: 1560 - DNA, 273 bp, Lilium asiatic
gagacgcgtgggcggacgcgtggagccctctagaggtcctaaagggggcatgccaagagtctgatgttatagcaaaagcatcccaatgcttagacatattcagagactgttatcaccttaaagatggctgaaagagcttgcggagatagagaatacgtgcttgaccgaacatcaaagagggcaaagatgctttacatttgattgaacaagtatcatccctctaatacacattctcacatgaagatgacgtaaatgaacatatgcgacaaaata

SEQ ID NO: 1561 - DNA, 410 bp, Lilium asiatic
gactggttcatgttaaacttacactatgatgggcaaaccagaagcgacagagcagaagggattgattcctcggtccttggaacaaattttccagatcagccaaactttacaaactcagggttggaaatacaaaatgcaggcatcaatgcttgagatttacaatgaaacaattcgtgatttattgtcacctggccgaccaggcagtatggaagcaaatgctgctcttggcaagcaatacaccatcaaacacgattgcaatggcaatacacatgtatctgatctcaccattgtcgacggctgtagtattaaagaagtttcttttttgttttagcaggctgcacatagcatgtctgtgggtaagacacatatgaatgaacaatccttaagaagtcattttgtgttcacattgc

SEQ ID NO: 1562 - DNA, 221 bp, Lilium asiatic
cggacgcgtgggcggacgcgtgggccgatacgtgcgctctgtgcttagaatgtgaaagcactgctaccgatgtgtctgcaagggcatgtgattctttgtcagatacaactgaccctatattgccatggaacaccaaaaatttgtctgctagaaaatgagggaagaggttagcacacacatttgcatgatgctcgcggtatatatagcgtacgaaaagaacg

SEQ ID NO: 1563 - DNA, 246 bp, Lilium asiatic
cccacgcgtccgtggaggttcatgtacacactggtgaggatttgggtgtgaagatggagaggcctgctgaggagcctgccgcataggttgagactgatattgtcggtgcttaggcctcccatttttggtttactgttatcttcagcaatttaattgtagcaggaacttgtagggctatttgtggttacttaatttaaggtaagtttgttgtttgttttttgtttcttgctgttgtgagattttttt

SEQ ID NO: 1564 - DNA, 453 bp, Lilium asiatic
  modified_base (308)..(308): a, c, g, t, unknown, or other
cttaaagcaaaatacttaataacatggcgatacatttatacaaaacttctaccccgagcacacgcaatggagccatagacagtcaagtaaaatccaatccacgaaataatttgatccatggacagcgtcgttgtagtaaaggtcgtaatgccagaggaatcattaccgcagggcatagagggggaggtcataagcgtctataccgtaaaatagattttcgacggaatgataaagacatatctggtagaatcgtaaccatagaatacgaccctaatcgaaatgcacacatttgtctcatacactatggngatggtgagaagagatatattttacatcccagaggggctaatattggagataccattgtttctcgtacagaagttcctatataaatgggaaatgccctacctttgagtgcggtttgaactattgatttacgtaattggaagtaac

SEQ ID NO: 1565 - DNA, 218 bp, Lilium asiatic
cttactattaaccagttctggtcctactctcttcattgcactgctagagattgcgtgaaggagaaatgtatcacctggcatgcatctctgaactcttttgctagagtgaaacataacagagaactgaaccgggttctattgacctgaccaaagaggtatatgttttggatttcattgtaagttgatgctgttttggacttcattgtaagttttgatgc

SEQ ID NO: 1566 - DNA, 341 bp, Lilium asiatic
  modified_base (203)..(203): a, c, g, t, unknown, or other
  modified_base (247)..(247): a, c, g, t, unknown, or other
agaggctcttcatgagcaaggcgaacaattcgccgatttctctcaagaggcttatcaatttcatgtctggcaagggtgatcagattgctgtgatcgtggggacggtgacggacgacaagagggtgtatgaggttccggcgatgaaggttactgcgctgaggtttaccgagactgctagggctaggattgtcaaggctggcggngaatgccttacctttgatcagcttgctcttagggctcctcttgngcagaacacgattgctttgcgtggccctaagaatgctagggaggcggtgagacactttggaaaggctcctggagtgccccatagtcacactaag

SEQ ID NO: 1567 - DNA, 386 bp, Lilium asiatic
cggacgcgtgggcggacgcgtgggtggtggagattgcttacacgcgcgagccagagctatcaagggaggagttgatcatgcatgcacgaaggcggagatggagggctctgatgatgtgaaggtacgaggagcagaggatcaagcagaggagatgcacatgcagacggaccggatcgagaaccaggagatcaagcaccgatgattgatggctctgatgaagtgaagttctgatcagacggcgaagagggaggccgtgcatgaagactctagaagcttgtgtgagaggagatcaccattggttgtgcatgcatggtgctcggagaagaagggatgccaggcagaagacgagatctataaagccctaaggacgagcgatgaagttcccc

SEQ ID NO: 1568 - DNA, 381 bp, Lilium asiatic
cttactattaaccagttctggtctttctctcttcattgcactgctagagattgtgtgaaggagaaatgtatcacctggcatgcatctctgaactcttttgctagagtgaaacataacagagaactgaaccgggttctattgacctgaccaaagtggtatatgttttggatttcattgtaagttgatgctgttttggatttcattgtaagtattgatgctgttttggttagggaaatttaatacatgattttgtaagcctcaattccttggattgtaggctaactcccttttctgcaacttaccctgccaaaagatagcttccttcaaaaattctttcgatttagaggaaaccggtcaagcccctgaacttctgaaatttga

SEQ ID NO: 1569 - DNA, 401 bp, Lilium asiatic
ttttattcggaaaaatggcttccgttcatttcccatcgatctagtccgggagcttggccggcaacttttggagtctgtagcatttatgcatgaattacatcttattcatactgatctgaagccggagaacattcttctcctgtctgcagagtgtgttaaggtccctgattacaagtatatgccaagatcttccaaggatgttacattttttaaaaatctgccacggtctagtgctattaagctcattgattttgggagcacaacatttgagcaccaggatcacagctatgttgtatctacaagacattaccgcgcgccagaaatcatacttggacttggatggaactacccttgtgatttatggagcgtgggttgcattctgatggagctttgctcgggag

SEQ ID NO: 1570 - DNA, 304 bp, Lilium asiatic
acctcattgaacaaaacaaggcacaacttgtagtcattgctcatgatgtggatcccatcgagcttgtggtctggcttccggccttgtgcaggaagatggaaatcccatactgtatcgtgaagggaaaggctcgcttgggggcgattgtgcacaagaagactgctgcagctctgtgcctcactactgtgaagaatgaagataaacttgaattcagcaaaatattggaggcaatcaaggccaacttcaatgacaaatttgatgagatccggaagaaatggggaagtggtgtcatgggatcaaagtc

SEQ ID NO: 1571 - DNA, 381 bp, Lilium asiatic
ccacgcgtccgagcaggtcaagcatttttgatgctaaggctgggattgctttgaatgataactttgtgaagctggtggcatggtatgacaatgaatggggctacagcacccgtgtggttgatctcctccgccacatggctgcgaccaagtaggaggtggatgtccttaaccaagtagtaggtggatgtcctttttatggtggtgtagggtattgtagagaataaaagtcggcttcatggacttggagcatttatgctgagggaacctttgtttaatagtttgtatgggcgtcaggtggtggcccgcattttgcatcggcttttgtgaaaagctgtaaaatctttaatatggctggttgagagttttacgttatatggctgt

SEQ ID NO: 1572 - DNA, 256 bp, Lilium asiatic
aaaaaaaaaaaaaaaaaaaaaaaaataaaataaataaaaaaaaaaaaaaaaaaaaaagaggggaaaaaaaaaaaaaaaaaaaaaaaattggcctctctataataatccaatccttcctttctcatgcatgctacctactaattacttttttttttggcctaccttaatttaattgcctggctctttttttccaacttccttgctaaattccttcttttgcctaccctaatttatctttcttcgccccttttttttt

SEQ ID NO: 1573 - DNA, 407 bp, Lilium asiatic
gcagaagaatgtttaaaacgtgagaaggacagggtagccaattacttgcattcaagtagtgaacagaagttgttggagaaagtacaatccgagttacttgccatgtatgaaagccaacttcttgaaaaagaacattctggatgccatgccttgcttcatgatgacaaggtggatgatctgtcaaggatgtacaggctattttctaaaataacccgtggcctcgatcccatttctcagatatttaaacagcatgtcactgctgaaggtacatccctagttaaacaagcagaagatgccgcaagccaaaagaaggcagaaaagagagatgtggttggcatgcaagagcaggtatttgtgaggaaagttattgatttgcatgacaagtacatgacatatgtaaatgagtg

SEQ ID NO: 1574 - DNA, 431 bp, Lilium asiatic
  modified_base (340)..(340): a, c, g, t, unknown, or other
ctcaaatccctctgatggcgccaaagtcctagatgaagcccgcggtgaagaagccggtggcggagaaccctgccgccgctgaggagactaaagctgacccagcggatcccctgctgataagaaggcggccgagaagaagcccaaggctgggaagaagctcccggcctccaaggggaaggagggggagaagaagaagaagaggtcgaacaagtctgtggagacctacaagatgtacatcttgacggtcttgaagccagatcaccctgacatcgggagatacagcgaggccatggggatcatgaacagcttcgtcaacgacctcttcgagaagatggctcangagtctgcccgtctcgcccgctacaacaagaagaataccatcaccttccgagagattcagacctctgtccgccttgtcctccctggtgagc

SEQ ID NO: 1575 - DNA, 396 bp, Lilium asiatic
cccaaattattttggattttgtcaagccgattcagagatctcaatcacctttgtcgttgactattgccggagaatcagatcgactttattctttccgattatctcttctcctaacctcttctatcttctctgcattatggatttgatctttaattcagtttatagtttttgattttaggatttgtggagctaaggagcatttgtgtctgatcgatgtagcagagcaatggatggattcaaagaaggagatgttgatactttgtagtccaaaattccttggcgatcaaggatatcacaggaagagcgagggcatgatggtgacattacttgacggccaaggatcagcacgtagaggagaggggatagacgacaatatctctgtggaggtcaaggagc

SEQ ID NO: 1576 - DNA, 397 bp, Lilium asiatic
ggacgggtttcgacggaggtggatgcacgtttggcttatgatacacaggggatcatccataaggtgcacgagttgttgaaactatacaatgaggtagatgtctcctcagagcgtttgctcttcaaaattccttcaacttggcaaggaatagaggcctcaaggttactggaatctgaaggaatacagactcacttgacatttgtttatagctttcctcaggcagcagcagcagctcaagctggcgcatctgttatccagatatttgttggtcgcctcagggattgggcccgcaatcattcacgtgatcccgaagtagaagctgctgtcaaaaggggagaagatcctggattggcttttgtaacttaagcatacaattatatccacaaatattgacaca

SEQ ID NO: 1577 - DNA, 414 bp, Lilium asiatic
  modified_base (11)..(11): a, c, g, t, unknown, or other
gtgggggcggngttacttatgcaaatgcccataatgaagtgtggcataaacttgtgtcgcagacaaatggctgggtgacaagtttgtaatgaaagtttgatatgttcagtgaactccccactcacacaaatatgcctgtgcccacacaggcacaacagtaaattccctctggtgaggatccgagcatccagggtttcagctttcgtcgccgccgtcgctcgagagctcacaaatggctggacataagattgcgcacgtgacactgaaaggccccagtgtgatcaaggagatctgcatgggcatcacgctgggtctgttcgctggtggcctctggaagatgcatcactggaacgagcagagaaagacccgtgccttctatgacatgctagagaagggtcagatcagtgttgtcgt

SEQ ID NO: 1578 - DNA, 106 bp, Lilium asiatic
cggacgcgtgggcagacccagaccagcacaaaccgtgcacatgtaactagagtactctgtatcgatcaagcaacatgtttcagaaatctatggtggcttttatcgc

SEQ ID NO: 1579 - DNA, 389 bp, Lilium asiatic
cagggacttcgagtctggatcaagcctcctgattggaatttcatcggcccccatcgatccttcaaccgagagagagaatccacatcctcttcgctttcgatagaggagattcgacctgatcgcagcagcaatggtggcttcgagctcgtggtcgacggcgctgacgcggatctcgccctacacgttcgcctcgaccgggatcgcgatctcgatcggcgtctccgttctcggcgctgcttggggaatttacataacggggagcagcttgattggtgcggcgatcaaagctccgaggatcacttctaagaatctcatcagtgttattttctgtgaggcctgtgccatatacggcgttattggtgcaatcatattacagacgaagttagaaa

SEQ ID NO: 1580 - DNA, 281 bp, Lilium asiatic
ggcgagcgagggacttcagtctggatcaagcctcctgattggaatttcatcggccctcatcgagggttgggccgagagagagaatccacatcctcttcgctttctatagaggagatttgacctgatcgcagcagcaatggtggcttcgagctcgtggtcgacggcgcttacgcggatcttgccctacacgttcgcctctaccgggatcgcgatcttgatcggcgtcttcgtacttggcgctgctttggggaattacataacggggagcagcttgattggtg

SEQ ID NO: 1581 - DNA, 410 bp, Lilium asiatic
ggtcgctcagctgatagcgacacttatagctgtgtatgcggactggggatttgctgcgatcaaagggattggctggggctgggctggcatcgtttggctctacaatatcgttttctacatcccgcttgatatcatcaagtttattatccgctatgctctgagcgggaaagcgtgggatctcgtcatcgaacaaagaattgccttcacaaggaagaaagatttcgggaaggaagcgagggagcttaagtgggctcatgctcagaggacacttcatgggctgcaggcacctgatagcaacatgttcactgaaagcaacttcaccgatctcaaccagatggccgaagaggccaaacggcgagctgagattgctaggctaagggagctgcacactcttgaaagtcatgttgagt

SEQ ID NO: 1582 - DNA, 372 bp, Lilium asiatic
ctcatctaaaaagacttttccgcgacctttttattcgagagggatatcagtttgattatgtttgcgattggactgtcttgaaacaccctcagtttaccgcgaatgctaaagcacggccgtcaagtggaaggacaagtatagctgctacaccatctgtagagagggtagaaaggacgtcagcgggacaagaaattcgtgataaattctccggggctgtggaagcatttgttagaaggaacagttctgttcgcaatgcagatgttccgaaacataaaactctagaagaagcatctacaccatctgcaccatccagggatggtgttcccgacatagacaaaagccgcccctcgtcttctatgaatggaagcactt

SEQ ID NO: 1583 - DNA, 66 bp, Lilium asiatic
ggtcgaccacgcgtccgaaaaaaaaaaaaactattacaaacctttttatttaaaaaaaaatatata

SEQ ID NO: 1584 - DNA, 402 bp, Lilium asiatic
aagattcggaacgacttcaacatgaagcagaggagaattctaagctgagggagttcttggttgaccgtggccacgtcgttgacgtattccaaggagaggttgctgttatatgcgaggatattttcttactcaaagaaagagccgaaggacggatgcctctaagcagctcgatctcacggatgtcacgcagccccgcgtcttctatcagctcattgcaccagcgaagcatatccagtgaagacgctacacattcacatcactctcttgagagcccgaaacatcgttcttttgagagtctgaagctgaagacaagcagcggagagaccccaagaagcccgcgttctgcaagccttgttggtatcgattcttcggatgatgactgggagttgtgtgataataatg

SEQ ID NO: 1585 - DNA, 369 bp, Lilium asiatic
cttttgtataagaaggaacgacagcaatacattgaagcaatatgtgatgatgtttctccctcaactatatatggtgctgaacatctattgcgtctttttgtgaagctgccggagttattaagctatgtgaacatggaagaggaggcattggagaacttacaacagaatttgttagacttcctcaagttcctgcagaaaaaccagagttgcttcttcctctcgacttatgatggcctcaagaactctggtgaagcagatgacaaaaggagatgactggtttcatgctccatactacagtagaatcgtccaggcattaagaatagaagcatagcaggaatgattaatgaaacctcatgtaagatgtatgaa

SEQ ID NO: 1586 - DNA, 217 bp, Lilium asiatic
tcgcttttgtataaaaaggaacgacagtaattctattgaagcaatatgtgatgatgggggtcgctcaactatatatggtgctgaacatctattgcgtctatatgtgaagctgccggagttattaagctttgtgaacattgaagaagaggcattggagaacttacaacagaatttgttagacttcctcaaagtcctgcagaaaaaccagagttgcttt

SEQ ID NO: 1587 - DNA, 405 bp, Lilium asiatic
  modified_base (17)..(17): a, c, g, t, unknown, or other
gcgtccgaaggacctancatatccacataaaaccataggttgcatatggtcaaccgcttctgaggttcgaatccaacatatcaaaacagatatttcaggccaactttgctgttgaagacatgtcttctggatgttcgatgtggtcctctgatcatcttggtactacaggttctaccagaggggtcaacagttatcacaatggcaacttggtaatgcagatgttagaaaagaaacagccctacactgtgccaccagaatccaatcatgctatcaacgtacagccgtcatgtctagtagttccctctgtttcgccaaacacgtttcagatgggtaggagttcagcttctttgaatgagaacactttagtatacccctctcaagcattaagcggtatttacgtgggac

SEQ ID NO: 1588 - DNA, 307 bp, Lilium asiatic
gcgagatctccatggccaactctcgccattatatacgaaagctggtgaaggatgggttgatcatcaggaaaccccagaaaattcactcgcgctcacgtgctagacgggctctggaggcaaagaggaaaggacgccattccggctatggtaagcgcaagggtacaagggaagctaggcttccaactaacatcctgtggatgaggagaaagcgagtattgcggcgtcttctgcgcaagtacagggaatcaaagaagattgacaaacacatgtatcatgataagtatattaaaagtgaaaggtaatgtct

SEQ ID NO: 1589 - DNA, 292 bp, Lilium asiatic
ggtcgagggattcgtatggagacactctgttagcttgatcgatttgtcagcaattgcaggaaaatgatgagcgaggggaggagacatgatgtcatgactgccactgatatgggctctactccgggagatcgtgatcagctgcctcaaaactcaggtgaggcccttaatgctgtaacaccagctgcaaagagacccaagagggatgatgttggggatgaagaagatgtggatattggagatgatgagatgccagtgagaaattacccctcagtggaaattgataaggataatg

SEQ ID NO: 1590 - DNA, 379 bp, Lilium asiatic
  modified_base (7)..(9): a, c, g, t, unknown, or other
  modified_base (30)..(31): a, c, g, t, unknown, or other
  modified_base (65)..(65): a, c, g, t, unknown, or other
  modified_base (81)..(81): a, c, g, t, unknown, or other
  modified_base (128)..(128): a, c, g, t, unknown, or other
  modified_base (139)..(141): a, c, g, t, unknown, or other
  modified_base (188)..(189): a, c, g, t, unknown, or other
  modified_base (226)..(226): a, c, g, t, unknown, or other
  modified_base (334)..(334): a, c, g, t, unknown, or other
  modified_base (347)..(347): a, c, g, t, unknown, or other
  modified_base (374)..(374): a, c, g, t, unknown, or other
cggaatnnnccggggtcgaccccacgccgnntccgcggacgcccgttgggggagggatgactctncgattcgtccactcgngtcatctcttcctcgcttgtatggacagcactgcgttgtgagcaganatcctatgcannngctcatttgagccctaattcaagggggttgacgaatcacgcactgtnnatcggagctgattggaattggcctgggtggaccatcngttgagaagaaagctgttctcaagatgaatactttgataaagaacaattctcgggggactctttcgaccagggaagcgggatgctctgatcaatcttttgacgatctnctaagcctgatgnccatcttttcttggctacgctcgacancgatt

SEQ ID NO: 1591 - DNA, 375 bp, Lilium asiatic
  modified_base (15)..(15): a, c, g, t, unknown, or other
accactttcgtcggngctgcagaaatgtcgatgactgtcgaagtgcttgctggacttgcttttatgttttcatctagcattctattacaaatcctggcatgcgctttatacagcaactggtggccaatgctatcagctctaatgtatgtgttggtgcctatgccctgtctgttcttcggaggcgggtcaacaaatttcttgaccagcagagaaggtggtgggtggataaatgcagccaagttcttgacgggagcctcagcagttggtagcatcgccatccctgtgatactgtggcatgcccacctgattgaaacgggagcaatgttcattgagttcacgtccttcttcatcctcgtatgcacggtcctatgtttt

SEQ ID NO: 1592 - DNA, 212 bp, Lilium asiatic
ccggattccgggtcgccacgcgtccgattcctttgttctgagacgatggtggtcaacagagattcaatgtctagattttttatctgagatttttgttctagtttcttagtaaaaaagtggaatccagttggtaactaaagttgtattgatatcctttgtttggatctcataaactacattctcatttatccaaaaaaatccattccttcgct

SEQ ID NO: 1593 - DNA, 276 bp, Lilium asiatic
tcgcttgctctctcgaccaggttggtgctgcagagctaaggtacccaatagaaacgttccggtggcttcttggtgcttgcagagtcatttgagttggaacagtttcggaagtgcccgagtcaaatctttaagcatgaagcctccgaccacctttcgatgactttcgatgcgaccatcgagatagttactttcaaggaggtcaagatttgcggcgccctttggccgtgcacgtctcttccaacaaaaaacagtttcggtagtgagaccgaaattggt

SEQ ID NO: 1594 - DNA, 354 bp, Lilium asiatic
gtcacattaaagtacatctacacaattttaatttattgatttcacatccaaacactctgctaattttatacagagcttaaagctcaccaagatacacatatttctaaaaatactcttccagattttactatcttaccgacacttttcatcaacaataggcaatacacacgtaaattggacaaaaattcattccttaaagctatttttgcaggctttcaaaacaccacttaaccttctgtttgttttaatgaatatttaaaaacaaatgaatgctttgaaaacaattatttatgcttccaagataaggcagctaatatttcttctttcaaaaacacttttcatggaaaaatattt

SEQ ID NO: 1595 - DNA, 255 bp, Lilium asiatic
  modified_base (31)..(31): a, c, g, t, unknown, or other
  modified_base (71)..(71): a, c, g, t, unknown, or other
ctccccttaacactttcaactatatcttcanctaacttctccctgtctctttaccaccatccctctctccnccaaccttcctgtcacctcggatgccatggcttccatggcctatataactgcctataccgcggcattgaccatcttcgtcgctctgctccgctgggcgtaccgatcgatccaccccaagtcgagatgcatgctcccgcccgactccatgggcatccccctcctcggcaagacaatgcagatctt

SEQ ID NO: 1596 - DNA, 302 bp, Lilium asiatic
agctacataaatctctgatttcttgaaacaccgtgatttaattgtgatgtagaggtcaaccgctgaaaatgctgcatatgtggttaaatcacgatttaatcacaacttgggtgtcaacaaataaacgctcttttatcgctcacgtcctcacatgccattactcgtttgtatatctttatttgatttttgaaagcaatgcatgttagaagcatccatttaactaaattttctatctttttattatacgatgtttttctgatttccagaccaatttgcgacttttcctgattttagaagttttg

SEQ ID NO: 1597 - DNA, 328 bp, Lilium asiatic
agctacataaatctctgatttcttgaaacaccgtgatttaattgtgatgtagaggtgaaccgctgaaaatgctgcatatgtggttaaatcacgatttaatcacaacttgggtgtcaacaaataaacgctcttttatcgctcacgtcctcacatgccattactcgtttgtatatctttatttgatttttgaaagcaatgcatgttagaagcatccatttaactaaattttctatctttttattatacgatgtttttctgatttccagaccaatttgcgatttttccttgattttagaagatttgaccccaccgttttaatctttatttt

SEQ ID NO: 1598 - DNA, 419 bp, Lilium asiatic
attgaatctgatattaacattttcctgcctactttttacagaaagatgacttggggtgcatgggtctcgactggaaagtttgatttgaccggtagggttcttccatcacttcaggtgctgcagagtgctggggttctgtcttaatcttgcttgaatcactctaggctccagcccctcccctggaaagctggcaagagctatacgtgtctccacagtccgacctcctcttggctgtctgcttctaacgaccacttagtgggcttaactctttatagaggcgtggcgctgctcgatgcttctgatcaataggaataggagggtccgaaggagaagcttcttgatgagcatctattggagtcgatcatttccaagatctaattccagtttcttattatgtagtggaaacgccttacaatctt

SEQ ID NO: 1599 - DNA, 377 bp, Lilium asiatic
cggacgcgtgggcgccgcccgaaatggatccctgcgccgccgctgctggcggctacaaatcgcatcaggaggcgccgccgcccgaagtggatgattcgagagtacccagcgctgccgttgccggggcctacaagccgcagcaggaggcgccgctgcccggaatggatgatccgaaagaactcagcgccgccgttgctggaggctacataccgcagcaggaggcgccgacggcccctccgaggctgtcctgcaccaagtgcttcgacaccttgtggttctgctactctcctttttaccaggtgcaacagtattacagatatggaaaattcgacaattgttttgggaagtggaatgctcttgttgactgcttgagtctc

SEQ ID NO: 1600 - DNA, 260 bp, Lilium asiatic
acgcagacacgtgggcgctccccgaaaaggatctctgctctcccgatgatggcggctaccaattgcattatgaagtgccgcccccccaaatggattatttcaaaattcccaactcttccctttcccgggcctataaaccccaacatgaagcccccctttcccgtatgggttatcccaaataacttttcaacccccttgcttgtagctacattccctaaaaagaagctcccaccgccctttctaagctttacttcaccaaa

SEQ ID NO: 1601 - DNA, 306 bp, Lilium asiatic
  modified_base (17)..(17): a, c, g, t, unknown, or other
  modified_base (23)..(23): a, c, g, t, unknown, or other
  modified_base (95)..(95): a, c, g, t, unknown, or other
gcgtccgcgcactcatnaactcntctccccttaacacattcaactatatcttcagctaacttctccctgtctcttcaccaccatccctcgctccnacaaccttcctgtcacctcaaatgccatggcttccatggcctatatatctgcctgtaccgcgtcattggccatcttcctctctctgctccgctgagcgtaccgatggagccaccccaagtcgataggcatgctcccgccatgctccatgggcatccccctcctcggcgagacgatacacttcttcgcgccaaacccgacctacgacgtgtc

SEQ ID NO: 1602 - DNA, 262 bp, Lilium asiatic
  modified_base (105)..(105): a, c, g, t, unknown, or other
  modified_base (109)..(109): a, c, g, t, unknown, or other
ccacccacacatgcccaaaaaatctctatcatattttcttttttcctttacataagacctgcaaaaatttgttctttttatatatttaaacaaccatcaacttgnccanaatcttaaccacaccataattattcatttctctatacagaaccttcttcattcacaggaactgtgtctaactctataacactcaaccatatctaatttttgcctctttaccatccaccatttctacatgaataatcttatcacaaagtttatt

SEQ ID NO: 1603 - DNA, 372 bp, Lilium asiatic
  modified_base (39)..(39): a, c, g, t, unknown, or other
aagaaccggaacggccggggcgacccacgcgtgcctccnacacattattaacaacattatttgcctaataaaagataactaaccaccctatgctcattataaaaaatacaaatgaacctcatcactcataattaaaaatataaatcaaataaatgcaatttgtttcggctatttgattcttataaaaaaatacttatcatttatttttaatggattaaataaaatcaaatacttactatcatgacctttaataaaacccaacttaataatattttagaccaaactcaaagatgatacttcaaaaaaacccttataataataaacccaaaaaaaaccaattatatactccatattcactctataatctaactc

SEQ ID NO: 1604 - DNA, 442 bp, Lilium asiatic
catggcatcttcaaaagagacggtaatgatttgatcgtgacacagaagatcacgctcagtgaagctctgacagggtacacagtacaattgacgacactagacgggcgtaacttgaccattcccatcagttccatcatcaatccaaactacgaggaagttgtcccaggcgaagggatgccgattgtgaaagaaccctctaagaaagggaatttgcggattaaattccaaattaaattccctacaaatcttactacagagcagaaggtgggaatcaagcggttgttgtccccttcttgaggggttaaaattaagtgtttgttgtgcaatccttctgatgttttattcatttaaattatgaagcttagtagactggcaacttgtagatgtagtggcagaagaggaatttgtgtagagactggtttgttggtgaagttattttatt

SEQ ID NO: 1605 - DNA, 218 bp, Lilium asiatic
acccacgcgaacgaccactcctacaaaaatactacatacacatttacccatcacaacaattccactccctgcctgatgctttcaaccatacacatgccccccataactcaaaacttcaaataaacccccttatcattcctctctcaatctccaatctaacctaatctactatccataaaactatttttaataactaatttatcattaataataaaatc

SEQ ID NO: 1606 - DNA, 420 bp, Lilium asiatic
  modified_base (349)..(349): a, c, g, t, unknown, or other
cggcgtcagcctcgtcgacggctacaacgtcggcatgacagtgaccccccacgacagccgggggcttagaggcgtctgtcccgtcatcggctgcagagctaacttgctgaggagctgcccggacgtgctgcaggtgagggcgccggtcggcggcggggctgcggtggtggcgtgcaagagtgggtgcttggcttacaacaccgacgagctttgctgccggaacaagtataacagcccgatgacctgcagggcgtcggagtattcgaagttcttcaagagggagtgcccggagagctttacttatgcacatgatagtccgtcgctaacccatgactgtgcggagccgcangaagtgaaagtgatcttctgccatgatcagccctgccgttagggttttagtatgggtgtagggtttgtatg

SEQ ID NO: 1607 - DNA, 372 bp, Lilium asiatic
  modified_base (89)..(89): a, c, g, t, unknown, or other
  modified_base (94)..(94): a, c, g, t, unknown, or other
acctatataaccaactatttttaacacttgtttaacactcccaaccaaatcacccacacactgataatttttaataaatccacccaacnacaancacccacacacaacacaccctcaaaaccaacacttcaaatatcttgataaccctcctctctcttactcacttaaatccaacttctaatattattttcatcatcgttcccccatcatacctcacacacaaaaaaacctcctttcttcttcccttcttctttcccaacattcctaccctatcttacactttccccttctctttaacatacaattaacacccattttatactaatttttaaaaaaaaaaaatcatacatttacccaaactcttacacacac

SEQ ID NO: 1608 - DNA, 144 bp, Lilium asiatic
  modified_base (46)..(46): a, c, g, t, unknown, or other
cggcgtcagcctcgtcgacggctacaactttttgcatgacagtganccccccacgacaggcgggggcttataggcgtctgtcccgtcatcagctgcaaagctaacttgctgaggagctgcccggacatgctgcaagtgagggcg

SEQ ID NO: 1609 - DNA, 320 bp, Lilium asiatic
ggacaacacatctaaagggtaaaagtgtaatttatccaagcggcagtgtcctcccactcagctatccaccagctcccaatattaaatcgccccatctcgcctagccccattcgcagccaaacaaactcaagagattcgcagccaaacaaactcaagagatcctaaatctcagctccgatctcaccgtcatcgtcgccatggccaggaagttcttcgtcggcgataactggaaatgcaacgggaccagcgaggagattaagaagatcattgctactctgaattcggctgacgtcccgtcgggtgatgttgttggtatgtac

SEQ ID NO: 1610 - DNA, 426 bp, Lilium asiatic
  modified_base (399)..(399): a, c, g, t, unknown, or other
caagatctgatctccaatgatgagctcctctctgattcatttccctacactgagattgaaaatggtatgctgtgggaggtggaagggaagtgggttgtccaaggagccctcaatgtagatattggtgcaaacccctcagctgaaggtggtgaagatgatgaaggggttgatgaccaggccgtaaaggtggttgatattgttgacaccttccggcttcaggagcaacctgctttcgacaagaagcagtttatggcatacatgaagcggtatgtcaagcagttgacgcctaaacttgatgccgagcagcaggtgctatttaagaagcacattgagggggccattaagtttctgcttccgaagcttagtgatctgcaattttttgtgggtgagagcatgcangatgacagtagcctggtgtttgcttat

SEQ ID NO: 1611 - DNA, 424 bp, Lilium asiatic
  modified_base (329)..(329): a, c, g, t, unknown, or other
cccacgcgtccgcccacgcgtccgcttttatccgttagatctgattgactgcttttggccaaatctcacatctatgatggacttcggttttcatgtcctccgatttgttcttaattggacaagatatgctgtgagatccttgggaatcatacttgacaggacttcatcaatgtgtggctgttctgttagcgggcgtccggtcgatatcaactttcaactgtgagagctttcacacttgtctcaggattagatctgagaattgtctatgtcaattgatgtaagacatatgttgtcttcctccgtgctgagagaggagagatcttactcangattctggagctcatcattcagcacgcgataacgccactgagagtttcttagattttactgccgtaatcatcagaaaatggaagcattgtaacct

SEQ ID NO: 1612 - DNA, 402 bp, Lilium asiatic
ggaatccttgggagattgtaagacatgatatttcttatcctatcaaattttacggaaaggtagtcgtagggtcagatgggaagaaacactggattggtggggagaatattaaagctgttgcccatgatgttcccatacctggatataagacgaaaaccactattagccttcgtctttggtcaacaaaattgccagctgtagattttgatttagcagcttttaatgctgggcaacactcaaagggatacgaggcacatgcaaatgctgaaaagatttgctatgtactgtacccgggagacgaatccttggaagggaaaagccttcgtctgaaacaacagtatacactatgttctgcttcgcttcaagatattattaccccgtttgagaaaagatctggaaatc

SEQ ID NO: 1613 - DNA, 339 bp, Lilium asiatic
gaatccttggagattgtaagacatgatttttcttatcctatcaaatttacggagggggggggttggtcagatgggaagaaacactggattggtggggagaatattaaagctgttgcccatgatgttcccatacctggatataagacgaaaaccactattagccttcgtctttggtcaacaaaattgccagctgtagattttgatttagcagcttttaatgctgggcaacactcaaagggatacgaggcacatgcaaatgctgaaaagatttgctatgtactgtaccccgggagaccaattcttggaggggaaaaaccttcttctgaagcaacagcatac

SEQ ID NO: 1614 - DNA, 263 bp, Lilium asiatic
atccttgggagattgtaagacatgatatttcttatcctatcaaaatttacgggggggtagtcgtagggtcagatgggaagaaacactggattggtggggagaatattaaaactgttgcccatgatgttgccatacctggatataagacgaaaaccactattagccttcgtctttggtcaacaaaattgccagctgtagattttgatttaacagcttttaatgctgggcaacactcaaagggatactaggcgcatgctcatgct

SEQ ID NO: 1615 - DNA, 320 bp, Lilium asiatic
cgcagcgtgacaccattattagtgccattgatccatttggatggttaatcttgtctatcgtgtttgttgttgcactgagcttatatacgagcttgatttatgtaggctacctgagtactttgagactgatggtttctttctctttcaatacaaattgggccggatccgtgcatgggcatgatagttagcgcccgctctgggtgggggactctttatcacatggattacttgcatgttcctcaaactactgattttattgcatatgtttatgcttcagttttatattgcatttgtttctcctttagtttctacgtctaaat

SEQ ID NO: 1616 - DNA, 428 bp, Lilium asiatic
  modified_base (10)..(10): a, c, g, t, unknown, or other
cccacgcgtncgtggaggttcttgcctttaaaactttgaaacataaaggccaagcatgggtcatatttgaggatgttacatcagcatctgaagcacttaagaggatgcaaggatttcctttctatgacaagccaatgaggattcagtatgcaaagaccaaatcagatattattgcaaaggctgatggtacttttgttcctagagaaaggcggaagaggcatgatgataaagataaaaagcgcagagaacaacaccacgatgctaatcattctggttcggcttatccgggtgcctatggtgctgcgccgcagctatctcaaatgccttattctggaagggccaagtctatgctttccgaggcaccaacgctgcctaacaacatacttgttgttcaaaatctaccccacgagactacatcgatgatgctc

SEQ ID NO: 1617 - DNA, 439 bp, Lilium asiatic
  modified_base (61)..(61): a, c, g, t, unknown, or other
acccacgcgtgcgaccacacatacgaggatgttcttgcctttttaactttgaaacataaangccaaccaggggtcgggtttgaggatgttgcatcagcatctgaagcacttaataggatgcaaggatttcctttctatgacaagccaatgaggattcattatgcaaagaccaaatcagatattattgcaaaggctgatggtacttttgttcctagagaaaggcggaagaggcatgatgataaaaataaaaagcgcagagaacaacaccacgatgctcatcattctggttcggcttatacgggtgcctatggtgctgtggcccagctatatcaaatgccttattctggaagggccaaaactatgcttcccgaggcaccagcgctgtctaacaacatactgtgtgttcaaaatataccccacgagactacatctatgatgc

SEQ ID NO: 1618 - DNA, 154 bp, Lilium asiatic
ctgagcttatatacaaacttgatttatgtaggctacctgagtactttgagactgatgggttctttctcttttaataaaaatatggccggattccggcatgggcatgataattaacgcccgctctggggggggggctctttatcacatggattac

SEQ ID NO: 1619 - DNA, 408 bp, Lilium asiatic
  modified_base (45)..(45): a, c, g, t, unknown, or other
ctctcctcttattccctcttgatttatttcttctcgtactactgntgtgtgataaagaaaggggttcagtaaggtttgtagaatatatgtaagttgtttatactttaatattgtataattattttgttcttaaattcctgcttgctaaattggtatatatatatatatatatatatatatatatatatatatatatatatcctcccaattttgacatcaaccatagaggaagcattttcaacttaaaattatcaagtcagaactctgcacaaaaatgaatgacgaatttcttatatattctatgattgtttacatcaaaaaggaaattacaataagatttaacacatatttgataattaatggtttttatgtaatgaaatagtggagcgtacaacttctgagaaccac

SEQ ID NO: 1620 - DNA, 259 bp, Lilium asiatic
ccgaacgttatgagaagaagcactctagactaatgtcggggattactgcatcatcttaggtctccaatgtcgagggatactccaacgtgtctatacccaagaaagggtcgaacacaccgggggactgtacgtccgtagagaccggatgtgtcagtaggactttcatcaaaagaagaagcacgtcgggctaacgaacatcgaaaattactatttcatgcccggtcctgtacatctagagagaccatcatttctgtatgtc

SEQ ID NO: 1621 - DNA, 394 bp, Lilium asiatic
ctctcctttattccctcttgatttattttctctcgtactactgttgtgtgataaataaagatcttcagtaaggtttgtagaatttatgtaagttgtttatactttaatattgtataattattttgttcttaaattcctgcttgctaaattggtatatatatatatatatatatatatatatatatatatatatatatatcctcccaattttgacatcaaccatagaggaagcattttcaacttaaaattatcaagtcagaactctgcacaaaaatgaatgacgaatttcttatatattctatgattgtttacatcaaaaaggaaattacaataagatttagcacatatttgataattaatggtttttatgtaatgaagtagtggagcgtacaac

SEQ ID NO: 1622 - DNA, 415 bp, Lilium asiatic
ccatgctctcgaaggacagaatagcgtatttctacgacggggacgtgggcaatgtttactttggaccaaaccatccgatgaagccacatcgcctatgtatgacacaccatcttgtcctgtcatacgaacttcacaagaagatggagatatatcgaccacataaggcgtatccagtggagcttgcacagttccattcagcagattatgtcgagttcttgggacgagtcactcctgatacacaacattcatatttaaatgaattagccagatataatcttggtgaagactgtcctgtgtttgagaatatgtttgaattctgtcagatttatgctggtggaacaataaatgctgcaagaagattgaacaatcaaatgtgtgacattgccataaattgggctggggggttacatcatgc

SEQ ID NO: 1623 - DNA, 406 bp, Lilium asiatic
aaaaaaaaaaaaaaaaaaaaaaaaaaatttttataaaaaaaaaaaaaaaaaaaaaaagggaaaaggaaaaaaaaaaaaagataaaaaaaaaaaaaaatatggatgaaaaaaaaaagggggggtgtattataaagggtgggcgtttttttttggttttttggttatatatcgcttttttttgaggtaattgttttttttttttgtggccattttttaaaaacttggggatggggaaaacctggtggattgggaaaatatttgtgtttttcaaatttattttttttcaaggatggctcttttttaaaggtttttatattttgggtttttccaaaatgtgctggtttttatatgttttttgggaactttttatggggaggggaatttctgctgttggtttttttttttt

SEQ ID NO: 1624 - DNA, 348 bp, Lilium asiatic
gaaaaaaaggggggacccacgcgtccgccatgctctttaaggacagaatatcgtttttttactacggggacgtgggcaatgttgagtttggaccaaaccatccgctgaagccacatcgcctatgtatgacacaccatcttgtgctgtcgtacgaacttcacaagaagatggagatatatcgaccacataaggcgtattcagtggagctcgcacagatgcatttaacagattatgtcgagttcttgtgacgagtcactcctgatacacaacattcatatttaaatgaataagccacatataatcttggtgaagactgtgctgtgtgtgagaatatgtttgagttctgtc

SEQ ID NO: 1625 - DNA, 416 bp, Lilium asiatic
cgcaattcgctcgagagctcgaagtcgccgacggtcttcggtcgagtttgcggagataactcaagtttctagacaacaatgtcgatgggtatgatgaagccgctgaaggctggttttgaggagcagcccgatgctcaccgcattcggattactctttcttctaagaatgtgaagaacttagagaaagtctgtgctgatctcgttcgtggtggaaaagacaaggggttgagagtgaagggacctgttaggatgcctactaaagtcttgcatatcaccacaagaaagtctccatgtggagaaggtacaaatacctgggaccgctttgaactgcgagtgcacaagagggtgatcgacctggtcagctccccagaggttgtgaagcagatcacctcaataacaattgaacctggggtcga

SEQ ID NO: 1626 - DNA, 418 bp, Lilium asiatic
ctttgcgagaaaccatttttgtcatcaggcctggagttcgttcctttaccagtagtgcatggagaaaattacatttctttagggtttctgtttgggcgaaggtcgagaattgcatatatatctgatgtttcacgcttccctgctagcacagagtatgctatctcaaagtctggagggggccagctggatcttctaatcttggataccttgtacaaggaaggctctcataacactcacttttgctttcctcagactctcgatgctgtaaaaaggatatgtcccaaaagggcgctgttaattggaatgactcatgagtttgatcaccaaaaacacaaccatgagttggcggaatggtctagcaaagaatggatttcagtgcagcttgcattcgatggactacaagtatttgttgatttat

SEQ ID NO: 1627 - DNA, 354 bp, Lilium asiatic
ccacgcgccccgcatacactttgcaagaaaccatttttgttatctttcctggagttcgatcctttacgggtagtgcatgtaaaaaattacatttctttacggtttctgtttgtgcaaaggtcgagaattgcatatatatctgatgtttcacgctttcctgctatcacagaatattctatcttaaagtctggagggggccagcttgatcttctaatcttggataccttgtacaaggaaggctctcataacactcacttttgctttcctcatactctcaatgctgtaaaaaggatatgtcccaaaagggcactgtttattggaatgactcattactttgatcaccaaaaacacaac

SEQ ID NO: 1628 - DNA, 333 bp, Lilium asiatic
  modified_base (162)..(162): a, c, g, t, unknown, or other
cggacgcgtgggcgccgccgcttctagtttcgccggcgatcatcggcgatgggaggtaagtgcccgcaccgcaagatcaagaaacggaggctctctcacaagtccgcccgtcgcaccaagtttgagctcaacggtgacgacacggtctacaacgagctcaanaagctggccgagggggccgaggcgaaacctctgccgcctgatgaggaccttcccgggatgggccagttctattgcacccactgcgaccggtatttcgccagcgaggcggggaaggaggagcatctcaagtcgaagcgccataaaaaacgggtgaagctaatgaaaggacct

SEQ ID NO: 1629 - DNA, 138 bp, Lilium asiatic
  modified_base (20)..(20): a, c, g, t, unknown, or other
  modified_base (38)..(38): a, c, g, t, unknown, or other
cattctctatcaattttttnctttcttccatacccctnacacccttgtttttttttaaaaatatcaaccacccccccctcacttacattaaaatccacatccctcaaatccccaaaaaaaattctctcctttcttcaa

SEQ ID NO: 1630 - DNA, 294 bp, Lilium asiatic
acaattcaattccacctttttctcatcactatactcaaaacatcctatttgtcctttttaaacacagaaatcctccaacataccttatcccacaatattacatttcctactcttactattcttcataaaacttcataccttactaaaacaccttcatttttttcatcaaacagaattttccatcacattctttctataacaatctccacctctactctatctaccatcaaaaatcatatcactacccctccaaaatcaaaccctttattttatacatacgtacaaacaaaactt

SEQ ID NO: 1631 - DNA, 415 bp, Lilium asiatic
cggacgcgtgggcgccgccgcttctagtttcgccggcgatcatcggcgatgggagggaagtgcccgcaccgcaagatcaagaaacggaggctctctcacaagtccgcccgtcgcaccaagtttgagctcaacggtgacgacacggtctacaacgagctcaagaagctggccgagggggccgaggcgaaacctctgccgcctgatgaggaccttcccgggatgggccagttctattgcacccactgcgaccggtatttcgccagcgaggcggtgaaggaggagcatctcaagtcgaagcgccataagaaacgggtgaagctaatgaaaggacctgcgccgcacactcaactggatgccgatctagcagcggggatggggatgcctgacaatggcccacagctcatgtcgacataaa

SEQ ID NO: 1632 - DNA, 234 bp, Lilium asiatic
tattagactttcctttttattgaaacctctccaacatctgggatgggtgactaaaaaacatctatctactctcttttacactttatgtctattaatatctgtattcattataaaaattctacgaatttgtaaatatattaaaatatatatatatctaataatactaaatgttaaatatattatacttgtctctattaaaatttctacgttttctattttttttctctattttcc

SEQ ID NO: 1633 - DNA, 293 bp, Lilium asiatic
  modified_base (30)..(30): a, c, g, t, unknown, or other
  modified_base (186)..(186): a, c, g, t, unknown, or other
cggaaaaccgggggacccacgcgtccgggncgcatgggcgccgccgcttctatttctcctcgatcatcggcgatgggaggtgggtgtgcgcaccgcaagatcaataaacggaggctctctcacaagtccgcccgtcgcaccaagtttgagctcaacggtgacgacacggtctacaacgagctcaanaaactggccgagggggccgaggcgaaacctctgtcgcctgatgaggacctttccgggatgggccacttctattgcacccactgcgaccggtattttgccagcgaggc

SEQ ID NO: 1634 - DNA, 417 bp, Lilium asiatic
gcggagtaggagtctttccttcttgaaggagaaggttagaccacttcatgcgtggattgacgagagagaagggtgaatctctttttgatatttttgttttatgaaaagggaaatacataagtaaaatgcgaggaagttggaaatatataaaaatatagatatatggaataataggaaatgtgaaatatataaaaatgtgtcttttttatttttggggttttctattttttttcggtattttgtgatattaaaacatgagtttacatctctactccacgataggagagagatgaaatgaaagatctaactaactgctaaagacgtaaaagatgatgacatgaaatattaattcattgctaggaaatgaaggagttaacaatttttcgaaaaaaaccttcatatttactaattgctctt

SEQ ID NO: 1635 - DNA, 416 bp, Lilium asiatic
attcttggcgatcgatcggagcggcggagttcaagcaatcctacggcggcgctgatggcggagcacgttgaagagccggaggttgtggtgcaggatcgggagtcccttctgggcaagatctcggagaagatccacggccacgattcgtcttcgtcgtcttcctccgattcggaggatgagaagaagccggaggtgtccgcggcggcggagatcaagtcgaagatcttccgcatttttggaagggagaagccgattcatcacgtgcttggcggcggaaaacctgctgatatattcctatggagggacaagaaagtctctgctggtgtgcttggtggtgtaacggccatttgggtcctgtttgatctgctggactaccatctgctcactctggtgtgccactgcctcatccttatgct

SEQ ID NO: 1636 - DNA, 301 bp, Lilium asiatic
accacgcgtgcgccaacaactccacaaccaccttgaccctccaacaccggcgaaagcggcatcaagggacatatatctactctcttgtcccctttatgtcttattcggattgttatgtgtcggattttggaaacacttgcattagtgtggtaaaatgaggaacggatcaaagctcaataaggaaaagacatgttgcaagcttgatgaggatatgctctcggatatataactacccctcctcccgcattggattgatgataagaggtctcactccggcccgagtgggggaggtcacattgtt

SEQ ID NO: 1637 - DNA, 274 bp, Lilium asiatic
  modified_base (15)..(15): a, c, g, t, unknown, or other
aaaaactgtaggcanacatctcgttccaaaaaaacacttttttttaaaacgaaattaatattccttttttcgccctacaattttctttttaaaaatatatttaaaaaaattccttaaatcaatttacatttgtttggcgttaaaacaacttctctaaaaaacaatttctttatatacaaattgccccataatacattttatctattttttccaaaaatgtgaataacaaaaaattccctaaataattatttcttttttgggaaaaaactttttt

SEQ ID NO: 1638 - DNA, 388 bp, Lilium asiatic
ctcgccggacggccgggtattccagatcgagtacgccgccaaggccgtcgacaacagcgggactgttatcgggatcaagtgcaaggatgggatcgttctgggcgtggagaagctgatctcgtcgaagatgatgctggcggggtcgaataggaggatccactccgttcatcggcattacggcatggctgtggctggcttatcagcatatggccggcaaattgttgcacgtgctaagtctgaatcgaccagctatgaaaaaacatatggtgaacccatacctgtgaaggaacttgcttatacgggtggaaggtatgatcattctgtgactctttatttggtggttgagacctttttgtgtggggaattatttcttggggggatatgataa

SEQ ID NO: 1639 - DNA, 431 bp, Lilium asiatic
gttttcccttccttgaagaacagtttcaagcttgatgcattactctcacagggcgatgaatttatctttattgccaactcaaataacttgggtgctattgttgacataaaaattctgaatcatttgatccacaaccagaatggatattgcatggaggtaactccaaaaactttggctgatgtcaagggtggtactctcatctcttatgaaggcagagtccagctgttggaaattgcacaagttccggatgcacatgtgaatgaattcaaatccatcgagaaattcaagatctttaataccaacaacctatgggtaaacttaaaggccattaagcatcttgtggaagccgatgcacttaagatggagattattccgaaccctaatgaagttgatggcgtgaaacttcttcaattggaaacagcaactggggc

SEQ ID NO: 1640 - DNA, 440 bp, Lilium asiatic
aatttgtgctaagacgtctcgtttaggcttcaagctattgcgaaagatgcaactgcggtgatggacctttattattctgttggaagtctggttcatatcaaggctcaaggttctggtgtcgtcctgtctgatgctgagggtgcatttcactccattaaggctctcagtcaaagtgatggaagatggcattttgattccattggcgccgaatctagtacttatgctgctgggatagcacttgaagcacttgcaggtgttgtttcattggcagaatcagaagtgggccagtctaagatgatggaacattatacttcgacgagaaacatgttgacactgacgagtatagaagtcctgtggcaactacggcttcagtagtacgtggcgtaactgcattttctgaagttatttccggaaagctaaatattccgggcgacaaaata

SEQ ID NO: 1641 - DNA, 361 bp, Lilium asiatic
ctaaaccctcccccgtctttcctcagcatccacagcccccgccgccgctcccacactcgccacgggatgctgtacatcgtgggactcggtctgggcgacgagctcgacatcaccctccggggcctcgacgccgtcaagcgctgccacaatgtctacgtcgaggcctacacctccctcctctccttcggtctcgcctccgacggcctctcgcgcttggaaaaattgtatggcaagagtgtcatcgttgccgatagggagatggtagaagagaagcagatgagatactggctgaagcatcggaattaaatgtcgcttttctttgtgtcggggatcccttcggtgcaacaacacataccgattt

SEQ ID NO: 1642 - DNA, 396 bp, Lilium asiatic
  modified_base (5)..(5): a, c, g, t, unknown, or other
gaaantgggaaggacccggcgtccagtaaaccctgccgcgtctttcctcatcatccacagtccccgccgccgctcccacacgggccgtgggatgctgtacatcgaaggactccttctgggcgacgagctcgacatcaccctacggggcctcgacgccgtcaagcgctgccacaatgtctacgatcaggcctacacctccctcctcttcttcggtctcgcctccgacggcctttttctcttggaaaaattgtatggcaagagtgtcatccttgccgatagggagatggtttaaaagaatgcacatgagatactggctgaaacattcgaattaggatgtctctttttttggtgtcgggcatcccttctgtgcaacaacacatacccgttttgttgtac

SEQ ID NO: 1643 - DNA, 419 bp, Lilium asiatic
cggacgcgtggggacaatttgtacagacatagtgtttctgaatctaggttggagctgcttattgaatcccttgatgaggtactaaaccaactttgcagtgtcattcttgagccactcagagatcgcattgtaacaggactccttcaagcatccgtcgatgctttagttcgggtcatacttgatggggggccctcacgtatcttctttccaagtgatgctaagttactagaagaagaccttgaaattttaaaggaatttttcgtttctggtggagatgggttgccgcgaggaacggtcgagaatatagttgcgcgtgttcgacctatactaaatttgcatagctttgagactcgagttttgattgatgacctgaaaattgtgagccaaggaagtcggagccaattcggagctgattcaaa

SEQ ID NO: 1644 - DNA, 375 bp, Lilium asiatic
gaaaggggcggcgacccacgcagacgcggactcatttagacaatttgtacagacttattggttctgaatctacgtgggagctgcttatttaatcccttgatgacccactaaaccaacttttcattgtcattcttgagccactcatagatctctatttatcttgactccttcaagctttctattatgctttaattcaacttatactttataggtgtcccttacatattttctttacaagttatgcttatatactataaaaataccttgaaattttaaaagattttttcatttttaattcatatctttttcctcgatgtacattctataatatttttacgctctgttctatctatactaaatttgcaatatctttta

SEQ ID NO: 1645 - DNA, 401 bp, Lilium asiatic
acgcggacgcgtggggcctgtccaaccaatggaagtaataaagcttgaacctaaagggttgaggcacttttaacacaaaacaaggagatgttattgcttacttggttaaagtaagggacagaagttatatacatactgttgttttattttacttactttaaggtacgtaagtctcttatataagacatcctgttgcttttattatatgtcttcaacgaaagttgaagcagacagtctattaaagaagaactacagtatacatatatgtcgctgcgtatcttgcttttattacttcaaccttccttaaagttcataaactcctgacttaaaccacgttggtgaactgcaaaagacggtaggcggcactacgcatgacgttcaagtccgccaccctatgtttt

SEQ ID NO: 1646 - DNA, 311 bp, Lilium asiatic
gaaggccgcggcgacccacgcatccgcggacgcgtggggcctgtccatccaatgtaagtaataaaacttgaacctgggggggggaggcacttttaacacaaaacaaagacatgttattgcttacttggttaaagcaaggtacagaagttatatacatactggtggtttattgtacttactttaaggaacgtaagtctcttatataagacatcctgttgcttgtattatatgtcctcaacgaaagttgaagcaaacagtctatttaagaagaactacagtatacatatattgccctccgtatctttgtttta

SEQ ID NO: 1647 - DNA, 177 bp, Lilium asiatic
  modified_base (42)..(42): a, c, g, t, unknown, or other
aaagaatataattcattttgatcttaagcgtttaaatctatngccgaacatgcgagatccacggcgaccaatctgcaacattggccatctggggttatcaaaggtgaagcaacacacattaacgtcaggaggtgttcgcgggactttaccatggatggccccctgaccttttaagtg

SEQ ID NO: 1648 - DNA, 395 bp, Lilium asiatic
cccacgcgtccgccgaaggagcgtcccagcctgagagcaatggtgtttgtgaaagcccagaaggccagggcctatttcaagcgtttccaagtcaagttcaagagaaggagagagggaaagactgattatcgtgccaggatccggctcattaatcaggacaagaacaagtacaacacaccgaaatatcgttttgttgtcagatttaccaataaggatatcaccgcacaaatcatatccgcaagcattgctggtgatatggttcttgctgcagcttattctcatgaactccctcgctatggtcttgaaattggtctcaccaactatgctgcagcttattgtactggtcttctgttggctcgtcgtgtactcaaaacactttgaatggacgaggacta

SEQ ID NO: 1649 - DNA, 424 bp, Lilium asiatic
gtacttatgagggtcgatttgaaattttgtctctctctggctcatatttgctgtctgagaatgatggccagcgcagtcgaactggtggactcagtgtgtgtctggctggacctgatggccgtgtgttaggtggtggagtggcaggtcttctgactgcagcttctcctgtccaggtggtggtgggtagtttcatcgctgatggccgtaaagaatcgaagccggtggctcctgtcgagcctccatctgctcctgggaagcttgcttcaggtgggatgatggggacagctactccgcccctgagggcttccatgagcgaatcttctgagggacctggcagccctctgaaccagagcacaggcggatccaacgatagcaataaacctggtatcccgaccatgcactggaattgaatgttagacatgta

SEQ ID NO: 1650 - DNA, 396 bp, Lilium asiatic
aaagaatatagttcattttgatcttaagtgtgaaaatctattggtgaacatgcgagatccacagcgaccaatctgcaagattggcgatctggggttatcaaaggtgaagcagcacacattagtgtcaggaggtgttcgcgggactttaccatggatggcacctgagcttctaagtggaaaaagtaatatggtaactgaaaaaattgacgtttactcatttgggatagtcatgtgggaattgcttactggggaagaagcttatgcaaatatgcattgtgctttcattattgggtgaatagtgaacaatacattgcgtcctcaaaccccgatatggtgcgatccagaatggaaagctttgatggaaagctgctggtctctgatctggtgagagccatc

SEQ ID NO: 1651 - DNA, 430 bp, Lilium asiatic
  modified_base (323)..(323): a, c, g, t, unknown, or other
  modified_base (328)..(328): a, c, g, t, unknown, or other
atccggcgaactccgccgcctcctgtcaacccgcgggtgcgagctatgtggaggagagccgagaggcagtctcgccgaccggggggaagcagccatctcgccgactcacatcttcggaggccgagggagtggccggtgctctatgttgtgttgattgccttgggatgcctcgcactgcttgctcttgtatacacctatgcttcatcaggtggattcagcagtgacaaggagggtcttagtaggagtgaaggcgttccttgcacatcagaagttcaacgagcgatacctctcttgaagaaagcatatggtgatagcatgctcanagttntacatgtggggacctgaacttgttcaatagttactcagttgctgaaagaagaagagacagaagcctggggtggtggaccatatgatttggaggatgctgata

SEQ ID NO: 1652 - DNA, 417 bp, Lilium asiatic
  modified_base (387)..(387): a, c, g, t, unknown, or other
ggttgcttgccttcgaaaggctctaggtgtagtgaacaagaaccaagacaagagacggcagccgacacttaaaagtttactatccgggaaacagatcctcgttgttgatgacaatgtggttaatcgtaaggttgctgctggtgctctgaagaaatatggagctatagtaacatgtgttgaaaacggtagatccgcagtttcaatgctcaaacctcctcacaagttcgatgcgtgctttatggatgtgcagatgccagagatggatggctttgaaactacaaaaagaatccgttgcttggaacaggaggccaacaagttacttgaatctggtgaagcatcaagagacgtgtatgagaataaggcacattggcacataccacttttggncatgacagctgatgtaattcaagccacaca

SEQ ID NO: 1653 - DNA, 420 bp, Lilium asiatic
  modified_base (6)..(6): a, c, g, t, unknown, or other
  modified_base (11)..(11): a, c, g, t, unknown, or other
cttatnaaggncgatttgaaattttgtctctctctggctcatatttgctgtctgagggggatggccagcgcagtcgaactggtggactcagtgtgtgtctggctggacctgatggccgtgtgttaggtggtggagtggcaggtcttctgactgcagcttctcctgtccaggtggtggtgggtagtttcatcgctgatggccgtaaagaatcgaagccggtggctcctgtcgagcctccatctgctcctgggaagcttgcttcaggtgggatgatggggacagctactccgcccctgagggctttcatgagcgaatcttctgagggacctggcagccctctgaaccagagcacaggcggatccaacgatagcaataaacctggtatcccgaccatgcacttgaattgaatgttagacatgt

SEQ ID NO: 1654 - DNA, 339 bp, Lilium asiatic
  modified_base (39)..(39): a, c, g, t, unknown, or other
atctcaacaaggctttttttaacgaaggctcatatttanctaactgacgatgatcgctcaacccatggctaccctccgacagcgtattaatcagacagagaatgaactgcataagctaacatgtgaattggatgataaggttcgttttgggcagaagactggtagtgataaccggccagggtcaggttctgcacgcatggaatttgcagacagacctctatcccgtgtaggaatgggtgacgcatgcgacatgccgatggaataaaaacgacaagtacgcacgcaagcagccttccatgagcgaatcttatgagggacctgacagccctctgaaccaga

SEQ ID NO: 1655 - DNA, 264 bp, Lilium asiatic
aaagaatatagatcattttgatcttaagtgtgaaaatctattggtgaacatgcgagatccagagcgaccaatctgcaagattggtgatctggggttatcaatggtgaagcagcacacattagtgtcaggaggtggtcgcgggactttaccatggatggcacctgagcttgtaagtggaaaaaggaatatggtaactgaaaaaattgacgtttactcatttgggatagccatgtgggaattgcttactggggaagaaccttatgc

SEQ ID NO: 1656 - DNA, 426 bp, Lilium asiatic
aaagaatatagttcattttgatcttaagtgtgaaaatctattggtgaacatgcgagatcgacagcgaccaatctgcaagattggcgatctggggttatcaatggtgtagcagcacacattagtgtcaggaggtgttctcgggactttaccatggatggcacctgagcttctaagtggaaaaagtaatatggtaactgaaaaaattgacgtttactcatttgggatagtcatgtgggaattgcttactggggaagagccttatgcagatatgcattgtgcttccataattggtggaatagtgaacaatacattgcgtcctcaaaccccgatatggtgcgatccagaatggaaagctttgatggaaagctgctggtcctctgatcctggtgagaggccatctttctctgaaattttcaacaagctgag

SEQ ID NO: 1657 - DNA, 410 bp, Lilium asiatic
ggaagccaattatgggacactgcttttgcagttcaggcaattatttctactggcctttctgaagaatttggacctactcttaagaaggcacatgaatatattaaaaaaacacaggtccttgacaactgcgacggtgatctttctgcctggtaccgccatatctctaaaggtgcatggcctttttcaaccgcagaccacgggtggcccatttcggattgcacagcagaaggactaaaggcatcgctctctttagcacggattcctccagaaattgttggcgaaccaatagaagctaagtggttgtatgaggctgtgaacgtcatcctctccttaatgaacagcgatggtggttttgcaacttacgaactaactagatcttatgcatggttggagcttatcaatcctgctga

SEQ ID NO: 1658 - DNA, 291 bp, Lilium asiatic
gacccacgcgtgcggtaaaccaatttttgatcacttattttttcatttcaagcaattatttctactagcccgtccggatgttattagaccttctcttaacaacgcacattaatatattaaaaaaacacaagtccttgacaactagccacagacatctattttcctgctacccccatatctctaaaggtgcatggcctttttcaacccgaaaccaaacgtggcccatttcagatttcacaccagaacgactaaatgcatttatttctttatcaccgattcctccaaaaattt

SEQ ID NO: 1659 - DNA, 428 bp, Lilium asiatic
gccctccaccttttctttctgttgcaagtaatggaaaccaccaggtaatgaaaggtaaaaaaggtgttagctttgcctctggaggctcaggaattctagactctacggggactaccattacaatgagagagcagatacaacattttgctactattcggttaaatataactgccagaatgacctcagagaaaaccaacttgttgctctctaaatctctattcgtcatcagcagtggaggcaatgatatattttcatatgtctctcgaaatggctccttcagtaatagcgagaaccgaaatttcgttgctactcttatctcgaactacaagaactatataacggatttgtatgttcttggagctaggaaattcgggatagtagatatccctcccattgggtgctgcccatacccaagaagtctgaaccct

SEQ ID NO: 1660 - DNA, 407 bp, Lilium asiatic
agaacttctactactatctctttgaaaaggaagttgaaggagagaatgtctgagtttcaaaatttgagggaagttatccagcaagaatatcgggaggttgttgagagaagagtatttacagtgaccggtactcgtgctgatgaagagactatcgaccatttgatagagacgggtaatagtgaacaaatatttcaaaaggcaattcaggagcaaggaagaggccaggtattggacacccttgcagaaattcaggagcgccatgatgctgtgagagatatcgaaaggaaactgcttgcattgcagcagattttcctcgacatggctgtgttggtggaagcacagggtgatatgctggataacatcgaaacccaggtttcgaatgctgtagagcatgttcagtcagggac

SEQ ID NO: 1661 - DNA, 418 bp, Lilium asiatic
agcaagatctgtggtcattggaagagttttgtgttctttctaatttcctattaagatccatttttgtcttgagatttagtgctctaacaagcaaggatcttctgttttaatcccttggtttttactggtggaaattactgcaaatgaatgttctccaagttggaggccactttcattatcgttcacaagctatttattgggtacaagtgtgcgcaaagttacaagttgaaggcagccttctaagattttgatttgcatgtgtgtattatcgttcacaaagttggaggcagccttctaagttgtctgctttagtataaataagtgcttcctcctcggtctgccaatagatcaagtatttatttttacagggttcaaactaggtttctgataacgggctgtagttttgttttttagtcct

SEQ ID NO: 1662 - DNA, 430 bp, Lilium asiatic
agcaagatctgtggtcattggaagagttttgtgttctttctaatttcctattaacatccattgttggcttgagatttagtgctctaacaagcaaggatcttctgttttaatcccttggtttttactggtggaaattactgcaaatgaatgttctccaagttggaggccactttcattatcgttcacaagctatttattgggtacaagtgtgcgcaaagttacaagttgaaggcagccttctaagattttgatttgcatgtgtgtattatcgttcacaaagttggaggcagccttctaagttgtctgctttagtataaataagtgcttcctcctcggtctgccaatagatcaagtatttatttttacagggttcaaactaggtttttgataacgggctgtagttttgttttttagtccctggtggtattta

SEQ ID NO: 1663 - DNA, 235 bp, Lilium asiatic
ttgccttttgaggcttaagaattttaaactctaccgggactacccattacaatgagagagcagatacaacattttgctactattcggttaaatataactgccagaatgacctcagagaaaaccaacttggtgctctctaaatctctattcgtcatcagcagcggaggcaatgatatattttcatatgtctctctaaatggctccctttagtaatagcgagaatccttaatttttt

SEQ ID NO: 1664 - DNA, 423 bp, Lilium asiatic
gtggacggcgcgccggaggtgaggatgaaggtcaacgaccgggtagctagttcaagcatgctgttgcgacacaagggccataatagaaaggtcgagtttgacagttggaccaaggatcaaaatcacggaccgcacgtaagtgacaaattggatattgttgttgacaaagagagcaggaaaacagagttggagaagaagttgaaagttctgaacgagaagaaacatcatcttgtgcaaatgttgaagcagattttacatgctgaagaagaaatacaaagacggagcactccatgcattccagcgtctggtttacgtgcttccatctctgttcagccagaaactgcatttgaaatgggttctgttaccaggcatagtcagaaactaagtgtataagtataatttggtggcgatctgggtggagaa

SEQ ID NO: 1665 - DNA, 378 bp, Lilium asiatic
agcaagatctgtggtcattggaagagttttgttttctttctaatttcctattaagatccatgggcggcttgagatttactgctctaacaaccaaggatcttctgttttaatcccttggtttttactggtggaaattactgtaaatgaatgttctccatgttggaggccactttcattatcgttcacaagctatttattgtgtacacgtgtgttcacagttacaagctgaaggcagccttctaatattttgatttgcatgtgtgtattatcgttcacaaacttggaggcagccttttaagttgtctgctttaggataaataagtgcttcctcctcggtcttccaatagatcatagatttatttttacagggtttaaact

SEQ ID NO: 1666 - DNA, 423 bp, Lilium asiatic
ccacgcgtccgagcaagatctgtggtcattgtatgagttttgtgttctttctaatttcctattaagatccagggggggctttagatttagtgctctaacaagcttggatcttttgttttaatcccttgttttttactgttggaaattactgcaaatgaatgttcttcaagttgtaggccactttcattatctttcacaagctatttattgtgtacaagtgtgcgcaaagttacaagttgaatgcagccttctaagatttttatttgcatgtttgtattatttttcacatagttttatggagccttctaagtagtctgttttagtataaataaattctttcttctcagttttgcaatacattaagtatttattttttacagggctcaaactaggttttttataacatactggattttttttttt

SEQ ID NO: 1667 - DNA, 414 bp, Lilium asiatic
cacgtgaagcaagtaaagctatctaatgctggaggtcgactgatcatctcaagtgacggtgtatgggacgctttgacatttgagatggcactaaactgttcttgtggattaccagcagatgttgcggaagctgtacagttaaaagggttaagagacgataccacctgcatagttgttgatgtattaccaccagaaaagataagcccttctttagcaccaccgaagaagtcgggaattggggtgttcaaaactatgtttcacaagaaatcctgcgagccaccgtgttgcgtggacagagactattctgaagcgatccttgtggaggaattgtttgaggagggatctgcagtgctttcgcaaaggttaaatacaaattatccgacatgcaacatattcaagcattttatatgtgcg

SEQ ID NO: 1668 - DNA, 403 bp, Lilium asiatic
  modified_base (342)..(342): a, c, g, t, unknown, or other
attgataatctaagtgaagattaaactctcctaactaattgttgtgctattcataattctaagatgacttatctaagaacttatcggtagccatctccagtccttttagtggcaccttccactaaatgctcagaggggagtattttattctacccggaggggcagttccaaaattaccccgaatacattccaatgcaggattgcgtatgttgataagttcacaccacaagggattcccgatggaacggtgtatgttaaaaccaccattttgacactcccactatcatccttgcccctaaataaacatctttgagagcttaaagactcattttaagtacattntgatgatccccatctcttctatcccatcttatcaaaatcatgtcaaatccttcagaaatgc

SEQ ID NO: 1669 - DNA, 362 bp, Lilium asiatic
  modified_base (327)..(327): a, c, g, t, unknown, or other
caacagcctcttaactatgtccacgagacggtgctgaagaagaggaaaaacaatgatgagtgggccctgaagaggagggagaggttggatgctcataagcagaagacgaaagataagaagaaagctgcgatcaaaaggcccgagcagtttgtcaaagaatttcgtgacaaagaattagacttcattcggatgaagaaaaggcttaaactaagaaagacttcacattatgacctcaagtcaaagctgctctttgttattcgcattcacggctcgcaagacatgcatccgaggtctagaaaaatcctgaattcattgaggttgagacanaacctcaccggcgtgttcgtcaaggttaatgaagc

SEQ ID NO: 1670 - DNA, 211 bp, Lilium asiatic
cacttaacaagacgtaaaacattaccagcatatgccccgaatacgatgcagatgaaagattctcaaaaccataccacctacgataataagaaagctgctatcaaaaagcccgagcacttcgtcaaagaatttcgtgacaaaaaattagacttcatttggatgaataaaaggctaatactaacaaagacttcacattatgacctcaagtcaa

SEQ ID NO: 1671 - DNA, 291 bp, Lilium asiatic
  modified_base (28)..(28): a, c, g, t, unknown, or other
  modified_base (45)..(45): a, c, g, t, unknown, or other
gggccgaccggagcgaccggccacgcgngcgggggaaaacacgcnacagacacgccaggccgcgggaagggagggaaggggggggggaaggacggagccaagcgccaccggaaggagcagcgggacaacagccagggcagcaccaagccgggaaacaggcgccaggcgcgccggggcggagagaaaaggagcagcgggcgcaaccacgaggagaccagggggggacagaagaaacagcaggagaacggaagccgggaggccggcaccgacaccgagcacgcgcggggaaag

SEQ ID NO: 1672 - DNA, 246 bp, Lilium asiatic
tcgtattttaagttaaatagagatcccacttctttacatttaagctttttgatctttaggggtggccgaagagcaaaaccggactgtttatggcacccaagtgcaagaacggggcctgtttgacttttttttcaagaaaaaggaggataaagtcaactaggatgttcttgttttcggtgttgataagatacatattgaatatgataagtctgatgatggagaataagcatacttttgtttgacaag

SEQ ID NO: 1673 - DNA, 252 bp, Lilium asiatic
cggtgaggccatcatgtctggatgaaggccctttacataatgaagagaagattcccacattcattcatcgagaggcgtggtcgctctgtctgtgtttctggctctaagattcgctttctatgtgacctttgttgccttttgtgggagggaagcgtcatcaggatgtggtcatggggctttacactacaatggttgatctggatggactcatttgatgaggacatggcgctcaatcatgtacgcggtacctac

SEQ ID NO: 1674 - DNA, 405 bp, Lilium asiatic
  modified_base (62)..(62): a, c, g, t, unknown, or other
gaccaacgcgtccggtcagcacggtagccacgtccccgatcttctttacttcttttccttcntctactctcggggggggggcgcttggatacgccaccaagcaccgccgccatagtgatctttagatcgcagccgggtgtgtggacggtggagacgacgggagaaggtggggacaagcaggagttggtggagatgggtaagtgggggatttgttggcatgatagcggaatttgtctgcagcgaacgagtagatcggcattaacttgaattgaaaaataaagtgtatgcaagggtcaaatgggtataggtgggcttgttataagtgacgatggatcgtgtgcctgccaatgattatggtagccctaatactgtgtgggcaatgattatttggagccctaatacctt

SEQ ID NO: 1675 - DNA, 428 bp, Lilium asiatic
  modified_base (407)..(407): a, c, g, t, unknown, or other
cccgagaagaacagccgattccactaccgatctgctccctctcctccgtcgcaacaagcactcagggctcactccgagatcccgcagggtgcatccgcctctaaatggcagtcacgggtaaccagagcccatcgtttggtgaaattagctgtggttctttactgcagaaattgcagctaatatgggatgaggttggtgagagtgatgaggaacgagatagaatgttgcttcagctggaacaagattgcttggatgtttacaagaggaaagttgatcaagctacaaaatctagagcacttcttctccaggagttagctgattcaaaatacgagcttactagacttctttctgctcttggtgaaaagacttacattggcattcctgagaattcttctggaacgatcaangaacaaactgcagctatagca

SEQ ID NO: 1676 - DNA, 407 bp, Lilium asiatic
aatttcaagtaaaagagagatcccacaccattacattcaagctttctgatctttagctatggccgaggagcaaagccgcactgttgagggcaccgaggtgcaggaccggggcctgtttgacttctttggcaagaagaaggaggagaaggccaacgaggaggttctcgtctccggagtcgagaagatacagatagaagatgagaagccagaggaggagaagaagcatactctgtttgacaagctccatgaggataagccggaggaggagaagaagcatactctgctcgataagcttcaccactccggcagctccagttccagctctttaagcgatgaggagggagctgatgaggagaagaaagagaggaagaggaagaagaaggcgttgaggagaagatgcatggtga

SEQ ID NO: 1677 - DNA, 326 bp, Lilium asiatic
gtgcaaacccctgagctgaaggtggtgaagatgatgaaggggttgatgaccaggccggaaaggtgggtgatattgatgacaccttgcggcttcaggagcaacctgctttcgacaagaagcacgttatggcatacatgaagcggtatgtcaagcaactgacgcctaaacttgatgccgagcagcaggtgctatttaagaagcacattgagggggccattaagtttctgcttccgaagcttagtgatctgcaattttttgtgggtgagagcatgcaagatgacagtaccctgctgtttgcttattacaaggaatgagctactgatcca

SEQ ID NO: 1678 - DNA, 428 bp, Lilium asiatic
ggtgccgcatccagatctatgttcggctcaactgttcacccacaatcctccagaatggctcaaaaaatattagaacaccttgaccgatcagtttcccccaaggaaaaatcaaaggagctggagctggctctatccaggctagatcctccaaaatctactgcttcctcaatcgataagaggcaagatgtgagaatttctgatgggtttttacttggaagggaaatgggtacttgtgagagtgaacatctaccaaaggttatttctgggtcttctacaagcaaatcccgacctgtatcagagttgtttaaggtccccaaattccagggcctttctggcagtggagtggttttcaagcctaatgaaggggtagaatcgtcgggtaatggtttgggctttacttttcctgcgcccccagcttcaaacttatc

SEQ ID NO: 1679 - DNA, 431 bp, Lilium asiatic
gagcggatcagctctttattgtatctcctcgccgccgctaccgcctctgccaacaccgccggcgctgccatggtgaagtactctagagatccctccaaccccaccaagtcatcgaaggcatgcggaaaggatctcagggttcacttcaagaacactcgtgagactgcatttgctctacgaaagatgcctttggccaaggctaaaaggtaccttgaggatgtcatggcacacaagcaggccataccattccggagatactgtggaggtgtaggccgtacaggccaagtgaaagctcgccactctaatggtcagggccgatggcctatgaagtctgcaaagttcattctggatttgctaaagaatgctgagagtaatgcagatatgaaaggcttggatgttgatgccctctacatatctcatattcaagtgaa

SEQ ID NO: 1680 - DNA, 225 bp, Lilium asiatic
ctacatttgtgaccgacacatcgtgctatagttatccattgcaaggatgaaattcctgttaacgaacccaaagattgttgcttattaataagttctgctatcaatcaaattaccaatcatgaatctttatgtgggacaacacactttaatccgttagagataccatctacttcagatcctcgtaatggactttatgtcagcgctcatggaatgcaaacctccgaa

SEQ ID NO: 1681 - DNA, 430 bp, Lilium asiatic
gcgcggtcgtttggttcacatacagcctcctcacctaagacatctatgttgcgattccaaacagagtaggcttcatcttcggagtcgctcacatggtgatttacatcatttacaaaagcagtgcaaagaaggtaactatcgcgcaaggggagcgactgccccagcatgttgtggccatcacgaagctcagccctgctccaaacttcgacgtggagaaggcccttgctgatgagatgaagatcagtggtgatgagagcaccgtgagcctttccgtggagaagggcctcgctgaggagatgaacatcggtagtgatgagagcacggtgaaccttccggcgtgaatgatgggtaggagaaatgatgatcatatttcaatcaaagagaatgaagagttcctctgcattttttggcatcgtttttttagataaga

SEQ ID NO: 1682 - DNA, 299 bp, Lilium asiatic
tcggaacaagaggctgatgaagagcgtgcttttttaaataaagatgctcaacgttcggctgaacggagtgctgatcttgtaatgtctgatcttgctaaggttatccttggtaaggagaagataccgattaaggtacttagagatgttggcaaattaataagttctgctatcaatcagaataccaatcatgaatctttatgtggtacaacacacttcaatcgtatagagataccatctacttcagatcctcttagtggactttatgtctgcgctcatggaatgcataccttctaagttct

SEQ ID NO: 1683 - DNA, 419 bp, Lilium asiatic
tgaaggtagtaaatcacgctgaagaaattttagaattgcaactggagttggatacactgaagacaatcattgaagcagagaggtcatctcgtgttgaggtagaggataagattattcatgccaaccacgagcttcaagtggcaaacgacacaatcacacagataaataagctcaaggaaagcttgatcaatgaactgaaagatgcaaaagctgtaattgaagctcttgaatccgagcatgtcatatatctaaaagagttggatgatctaaggaatcacaacaagtatgcagaccttataaagacacaggagcaggagacctcgaaatcgaaaaagtggctcggtgtccagtttgaaggggaaggaaagctgaccattccacatgaagagctaaaagatctgtctccgaagcaggcttac

SEQ ID NO: 1684 - DNA, 411 bp, Lilium asiatic
  modified_base (378)..(378): a, c, g, t, unknown, or other
gtccgttaagcttcttgaagtatatgctcattctctgattagatctgtggaaagatacttggctccctttgttgtgagtgtcactgggcagctcttggtgaatgctgttaaagctaatggagttatcagggatgttttctgggaattggattctggagattgttctgctcaacacatggatgctctggttccatatacagaaaatttgtcccttcagctcccctttgttcaagatgtaagcgatggagtgaatcctcttgacgtcagtaagaggagcattggtatttttcatatcctgatttttctaccgcccaggttccatctcctttttcagatggaagtaggtgaggtttcaactttagtccgcatcagaactgnaccactgccctgccttgcatatgtggacgaata

SEQ ID NO: 1685 - DNA, 423 bp, Lilium asiatic
gaaaaagacaagattaagtatctctcaacaattttgtcatttgtgggtaatttattctttttcatgggatttacatgtatttcaatcagccgaaacattaggagcaggttcgagtaattctgaaaaatgaagggaattttgagtatttcagattgggctgtagtggaacggtgaatgaggtttacattgtaggaaccaattgcctcaacaccccttcccacaggcacgagcatgcgagagtctcaaatgcttctctctttgtggcccccttcccataggcacgagtgactgagcacgtgagagtctcacatacttctctctctttgtggcccccttcccataagcacgagcgaccgagcatgtgagagtctcacatgcttctctctctttgggcctattgtgagcctgtttgttggatgcaca

SEQ ID NO: 1686 - DNA, 414 bp, Lilium asiatic
  modified_base (350)..(350): a, c, g, t, unknown, or other
cggacgcgtgggcggcagttgatatacaacttccctgaggaactttttgctgatgctggtatacttgccattgagcatgctgattttgatgggattgaacgactagctcttgttactggtggcgagattgcatcaacctttgacaatccagaatcagttaagcttggtcattgcaagctcatagaggaaataatgattggagaagacaagttgattcatttttctggagttgcactgggtcaagcatgcaccatagtacttaggggagctagtttccatgtgctggatgaagctgaaagatcattgcatgatgccttgtgtgtgctctctcagacagtaattgatagtanggtcttgcttggtggggatggcccgagatggtgatgggcaaggaggtggacaaacttgcccgta

SEQ ID NO: 1687 - DNA, 429 bp, Lilium asiatic
gccttatacgcctacgacgcttgattcggacattgggtactttgagttggttataaagatgtatccacaagggagaatgtcgcatcatttccgtgagatgcgagtgggtgactttctgtcagtgaagggccccaagggacgattcacgtatcaacctgggcaagtcagagcatttggcatgatagctggaggatctggcataacacctatgttccaagttacacgagcgatattggagaacccaacagacaaaacaaatgttcatctaatctatgccaatgtcacagttgatgacatccttctgaaggaagagctggaaagccttactagtaaatatccagatcgcttcaaagtgtactatgtgttgaatcagccccctgagtcttggaatggtggtgttggctttgtgtcaaaggagatgattcaaaa

SEQ ID NO: 1688 - DNA, 431 bp, Lilium asiatic
  modified_base (4)..(4): a, c, g, t, unknown, or other
  modified_base (13)..(13): a, c, g, t, unknown, or other
gcgnacacgcggnccaaactccagtgccggagctgccgcagccggcggcggcggctgatcccggcgagtacgcggctgtcctgaaacagaagctggacgtgtactgcgctgccgtcgccatggctcggagtcctgtcgtgaaacctcaagaatcttcttctgtagccacgagctgttcacaatctttagatgcttcacagctgggttctgaaaattctgtaagggggaatttatctaagatgcaaaataaggtaggtggtggaccgggtggagttcttgctgcacctatcataaagaatttagtggtccaagctaccagtgagtcgtctcgagagcagtcggatggtgatgagcttgaagctggacaggaattgagagaaaacatggaccctcttcatgccaagcgtgagagaaggatgctctccaatcga

SEQ ID NO: 1689 - DNA, 237 bp, Lilium asiatic
tcggtggaagccatatctgaggaagaaggtgatgccggctgtcattgttaggcagcgcgggccgtggcgccgtaaggatggtgttttacatgtacttcgaagataatgctggtgttattgtgaactcaaagggtgaaatgaaaggatctgctatcactgtacctatatggaaagaatgtgcttatctctgtctcatgattgcaagtgctgtctatgcttttgttgtatttcctgttg

SEQ ID NO: 1690 - DNA, 423 bp, Lilium asiatic
aatggctaagcttcccaccatcctgctgctcttgttccttgtcatggcctctgagagggggacgacgacggtggaggcgaggacatgcctgtcgcagagccacaagttcgaggggacctgtttgagggcggccaactgcgctagcgtctgccagacggagggattcaaaggaggggtttgcgagggcttccgccgccgttgcttctgcaaaaccgactgtcactgatgcctgagttcttggctttaataagtaatgttggattatctgagaagaataagatggacctggtaacgttggttttacagtctctccttcggtgtggggacttgttactttctcctaggtttctgttgtttgtgtctgggttgagctgaaggcctgtgttctgtaactggatttgtggtggagtgagttctcttgta

SEQ ID NO: 1691 - DNA, 430 bp, Lilium asiatic
cggacgcgtgggtgtgagcccatactatgctaaagagctcgtctctggagaagataaaggtgttgagttggacaaagatataaccatgattggcatcaaagggattgtgaatgggatggatattaatttttggaatccattgacagacaagtatatcactgccaattatgatgcgacaacggtaacggaggcgaagcgtgtcaataaacaagcactacaagcagaagttggcttgcctgtagacccagacattccagtgatagtcttcgtaggaaggctagaggagcagaaaggctcagacattctcgctgcagcaattccagatttcattgatgagaatgtgcagataataattctcggaaccggcaagaaaatctttgaaaaacaggtcgaagaaatagaagagaagtacccggacaaggcgagagga

SEQ ID NO: 1692 - DNA, 421 bp, Lilium asiatic
gaccccgcaatccctgttatcactggttttcttggaaagggctggaaatcttgtgctgtgactaccttaggcagaggcggtagtgatttgacagctacaactatcggtaaagcattggggttacgtgagatacaggtctggaaggatgttgatggtgttttgacatgtgatcctcatatttgtctaaatgcaaggcctgttccacttttgacatttgatgaggcagctgaacttgcatatttcggtgctcaggttctgcatccccaatccatgcgacctgcaagagagggtgatgtaccagttagggttaagaattcatacaaccctcaagctccaggtaccctcatcacaaagtcgagagatatgagtgaggctatattgaccagcatagttctgaaaccgaatattacaatgttggata

SEQ ID NO: 1693 - DNA, 432 bp, Lilium asiatic
  modified_base (411)..(411): a, c, g, t, unknown, or other
ctcgtgataaaggcttgcctcaaggtcctgtgtccacatcagtttctgtgaagtccacttctgttgcttctagcaaggatatcttgcttcgagtaaatgaaccaccttctgctaaagatggtgcatgtctcgtgccgcgcagtcctgttatatccccgcatcactcgggagattctgtttctttggatgaaactatgtctacctgtgattccatgaaaagtcccgactttgaatatatagacaatgatgactcttcagcaattgattcgttggagaggagagcaaccaagaatctccggatctctgagcatacagatgcaccagaatatacatggaagaaagatgtccctgttgcggtgcagacaactgatatgatcattgatgttgataaagataagaatgatcctcagntgtgtgcaacactggcatgtg

SEQ ID NO: 1694 - DNA, 277 bp, Lilium asiatic
cacgcgtcggaaggttctgccatcactgggcccatcggaaaggtttgcgctgatctctggcccaggattgctggcgcggcaaatgcgatcgtctaaaggaagcactttgtccaactttcatttaaaatggggactttataagggagttcttagttagacgagcttttgattgccctgaatatgtttcccccgctaatgcttgtgctgctggaccgcttcctgatagctttgctttgatgacatcctcccccttatcgataaaggtgcgtagcctgac

SEQ ID NO: 1695 - DNA, 417 bp, Lilium asiatic
ggcgacccggccaccagcggcggcggccacaattagggcttcggacatggagaagctgaacctcgagcaactgaaagccctaaaagagcagacggatctcgaggtcaatctcctccaggatagcctcaacaagatccggaccgctgccacccgcctcgagatagcctccaccgccctccatgatctctcgctccgcccccaagggaagaagctgctggtgccgctgacggcgtcgctgtacgttgctgggactctcgatgatgcggagaaggtgcttgttgatgtcgggacgggttatttcatcgagaaaaccatggctgaaggcaaggattactgtgaacgaaaaatcaatttgcttaaatccaattatgaagagctttttgaggtgacttcgaagaaaaaaagcatggcagatga

SEQ ID NO: 1696 - DNA, 419 bp, Lilium asiatic
ccagggcatcaccaagccggccatccgccgcctcgcccgccgcggcggtgtgaagcgcatgagcggcctcatatatgaggagacccgtggggtgctgaagatcttcttggagaacgtcatccgtgacgccgtcacctacaccgagcacgcccgccggaagacggtcacggccatggacgtcgtctacgcactgaagcgccaggggcgcaccctctatggcttcggcggctaatctatctatctatcttaaggttccgcggatgaagctagaaatcaaatcggtctcctcttatcttaagagtgttaagtttgtgatgtgaatcttcgttttttgttttcttctaaacatggagctgtattagatctttgtgagtttatgagctgttttgctatttcttaccggttccattttatctttt

SEQ ID NO: 1697 - DNA, 351 bp, Lilium asiatic
ggcgacccacgcgtgcgcgtcctacgcatcccggtgaccggtgttttccgatttggggggcgtcccttgcacactgcggtctgcggcttctccaccctccggagtcctatccagaggagcgcgctacggtacagatcgcccgacgttcattcctttcccagctctccagagcctgcgccgtcgcgtacggcgatcacatttcgaccggtttccaggtagtcacgtaccgcacctgtgcctctctctatcctctcctcgccgtatgcctcttggcgatttctattagtttttcattgtcacttaaactaagtcatctgctggtatgttctcgctgtcctttcataattttct

SEQ ID NO: 1698 - DNA, 361 bp, Lilium asiatic
cggctatgtgttggggaagaaaaaatcggtgaatgagaaggctaatgcagctggtgaagaggagcggggtcagtgggcggcgcgtgctgagtttctgaacattgcttattggaatcacggcagtgctccttcacgtgatgacccgctgatgcgcagatttcattggttctccattgcggatgctttgcacaagcctatcaccgcagaagagttggcatctgctttcgctactcatccgcagtgatgaatgagctacttatgttactcttttgtgttcgatgaagcacttgcacctatatgattgttcttaaatttatttctggtacaagctttactttcttaataaccaaacctttctttc

SEQ ID NO: 1699 - DNA, 388 bp, Lilium asiatic
tcgaccacgcgtcacgcgtcccgtgttctacgaaggatttatccgttctacctttgcaagggccgacacctgcggatccgggtgatcaacacaccggacgtgctcaccgacaacttagccgacctagccgaatggcttgccatctgcgggctatggaagatcccgtacgccaaccgatacgttcgtgcggctctctggaagtgcatagcatactacaccctaaccacacggttcagcggcaagcgggtgggcatcatatgcctggacaggatcggacaatcttgcactaatcgagtggtggccttccactgcccggtgagctaccaccagcggacggagcagcgggcgacgtacccgagctacacctactacccgtccgtggtggagc

SEQ ID NO: 1700 - DNA, 393 bp, Lilium asiatic
gaaaaaagaagctcaagccaagaggagaacaaagcaagcaaggctgttgttacacaactggagaatgattccgaacactcaaaattgaaacatgtacaaatgatgaaagatattcaactcgatcaggtctccagttcaccatatgagaatagcgttggttcctatggtccgaccaggattgagaattctgaaaccgatgatcaaatgctcaagttatgggaagctgcggaaagggcctgcatgggtcagatgaagagacccccacagctagttctggcgcatgatattgagccagtggaggaagaaaagagcgaatacccttcttccgaactggtggcagagaaggagttaagcatcgacaggctcgaggtatcctccgatcaggaatggagc

SEQ ID NO: 1701 - DNA, 190 bp, Lilium asiatic
cacactccactttcaagaaaccattagtctccgctttcggaggatgttcttataaaactggggttggatgcttctccctcctacgtgaaactattccaaagaacgcactatattacacaccgcccggtgtccaatcctttaccagatcttcacatcctgtgccatcgtttaatcataactcatttttacc

SEQ ID NO: 1702 - DNA, 201 bp, Lilium asiatic
accacgcgtccggaaaaaaaaaattcaagccaccaggataatataacatttcaggctgttccttcaaaactcgagaatgatttttctcactcctaattaatacaatttcaaataatgaaatatatttcacatcgtcacgcgttcatatcattatataataataacagtcttttccatcggttccccagaatacatatttat

SEQ ID NO: 1703 - DNA, 388 bp, Lilium asiatic
cctgaagaagaacagttcgcgccaggagggagatgatgtgatgatgaaggacggtttgggcgctgccgcagctgccgcgaacatgggtgtcacgccatattaagctcacctgctgctgctgttaacatgatctactgctactgctgttagggtttcttgcttaattccttcttctgtctagcttattatcgtcttgaacatggagtagtactgttaacaatgtttagttattagtttctagggttttatgatctgttaagcttctctttttcttttgggaactctgcttcttctatctgagtaaaggggaagcttaagaagtctcgttgcgagaaaggatggtatgctgccttttattggaaccgtgcaatgaaactactgttctatc

SEQ ID NO: 1704 - DNA, 130 bp, Lilium asiatic
cacgcaaaaagaagctcaagccaagaggagaacaaaacattccaggctgttgttacacaacaggagaatggtttcgtacactctaaattgaaacattttcaaatgattaaagatatttaactctatcaca

SEQ ID NO: 1705 - DNA, 388 bp, Lilium asiatic
cctgaagaagaacagttcgcgccaggagggagatgatgtgatgatgaaggacggtttctacgctgccgcagctgccgcgaacatgggtgtcacgccatattaagctcacctgctgctgctgttaacatgatctactgctactgctgttagggtttcttgtttaattccttcttctgtctagcttattatcgtgttgaacatggagtagtactgttaacaatgtttagttattagtttctagggttttatgatctgttaagcttctctttttcttttgggaactctgcttctcctatctgagtaaaggggaagcttaagaagtctcgttgcgagaaaggatggtatgctgccttttattggaaccgtgcaatgaaactactgttctatc

SEQ ID NO: 1706 - DNA, 388 bp, Lilium asiatic
cctgaagaagaacagttcgcgccaggaggtatatgatgtgatgatgaaagacgggttcggcgctgccgcagctgccgcgaacatgggtgtcacgccatattaagctcacctgctgctgctgttaacatgatctactgctactgctgttagggtttcttgtttaattccttcttctgtctagcttattatcgcgttgaacatggagtagtactgttaacaatgtttagttattagtttctagggttttatgatctgttaagcttctctttttcttttgggaactctgcttctcctatctgagtaaaggggaagcttaagaagtctcgttgcgagaaaggatggtatgctgccttttattggaaccgtgcaatgaaactactgttctatc

SEQ ID NO: 1707 - DNA, 323 bp, Lilium asiatic
aagaaacagccatctgagaaggtcgctcctgttccagctgtgagcagggaagctccaatggctgaggaatatatatatactccagccttgaaggctcttcccccaatcccggaacacgagcagcgagatctttttcaagtggatattggtggagaagtacaaagcgaagcctcatgattaattggagaaaaagaaaccggctgaataaaaagccctcctaaaaaacttcattcgagccgcatctatccgtacggggtagggattgcaccatgtattttacttcaggcaaagaacggtgcgcttagatgcgatgacccggcgga

SEQ ID NO: 1708 - DNA, 439 bp, Lilium asiatic
gatctctggttcccgtccatggcgagcgggtactacttgctgctgctgctgctcgccgggtcggccgccgatgagcgagccaacgagtcatcgccggcgggcatcgtttgggccgccgtcaaagacgagagcgacctagtcgacgccgccaccacaatcgaagacgaagatgatgagttggcggggggattctcctccttggagggcatgctgcagtgggccatcggacattctgatccaacaatgttgaaggaaaaagcaaatgatgtccaaagattatcatcaaatgaacttaagacacgacaattggagttaaaggagttgatggagaagttacaggtgccatcagatgcagagttgatgaaaatatctgtagatgatttaaataattcttctctttcttttgaagatcgtctgcgtgcactaaatgagctcttga

SEQ ID NO: 1709 - DNA, 409 bp, Lilium asiatic
gaggagaccaccaccggggtgaagcggctgtaccatatgcaggccagcggcgcccttctgtttggggctatcaacgttaatgactcagtcaccaagagcaagttcgacaatctctatggatgccgccactctctccccgatggtctcatgagggccaccgatgtcatgattgctggcaaggttgctgttgttgctggctatggagatgttggtaagggttgtgccgctgctctcaagcaagctggtgctcgtgtcatcgtgactgagattgaccccatctgtgcccttcaggctcttatggagggtctccaagtcctcaccctagaggatgttgtctctgaggctgacatttttgtgaccactaccggcaacaaggatatcatcatggtcgatcacatgaggaagatga

SEQ ID NO: 1710 - DNA, 210 bp, Lilium asiatic
  modified_base (189)..(189): a, c, g, t, unknown, or other
ctttatttgcttttatatatatacacatacgacatgcagggattgtcttcaacaacaatgttaaaggttaatgcagggattcctgactagaaagtgtccaagtatgtttgaaatttgagcaaatgcattgctcccctataatttggggaggtagtttaataaaatatataaccttacttatgggtgtgnaaaaaaaaaaaaataatgtac

SEQ ID NO: 1711 - DNA, 381 bp, Lilium asiatic
agatcttggtcccgtcatggaagcggtactacttgctgatgtgctgctcacgggtctggcgcgattaacagccaacaaattatttccggcgggcatagtttgggcccaccgataagactagagccacctacatcaccccgccatcacaaaccctaaataaaataatgagctggcggaaggattcttctccttggaaggcatgctctagctgtgcatcagacattctgattcaacaatgttgtatgaaaaagcaaatgatgttcaaagattatcatcgaatgaacataatacactgcctattggagttaaaaagaggtggtggagaagttacaggtgccatcagatgcagagttgatgaaaatatctgtagatgatttaaat

SEQ ID NO: 1712 - DNA, 367 bp, Lilium asiatic
  modified_base (365)..(365): a, c, g, t, unknown, or other
gtctgggagtccgtcagtcttcaatcgctcaggtgtaagggagtctcggagggattctctatgtcggccagtgaagaggctagatcttcatcctctatattctcagaggatacaagagagttgatatatgtattgggagttggtgatggaatgatcccgagattctgttgactgaagcatttaagaaaactacatgataggtgagtctactggatgtattagatttatacgataagattgaatgtatacatctgagatatccttagtcattctaaagttcttatgctaatattggatcctttgaaattttttgagttagtgatgtaatgagcagttatgaatatgaaagctagtatgagtatgantc

SEQ ID NO: 1713 - DNA, 440 bp, Lilium asiatic
cgacaatggatgtgataacgcagcagatctcggcggtgaggccgatagagaaggtgattctgcaccctctcgtcctgctttccattgtcgacaactacaatcgcgtcgcccgcgacacccgcaagcgcgtcgtcggcgtcctcctcggctcctccttcaagggcaccgtcgacatcaccaacagctatgcagtgccatttgaagaagatgagaaagactccagcatttggtttctggatcatgattatcacgaagcaatgtttggcatgttcaaaagaataaatgcaaaggaacatgttgttggttggtatagcactggtcccaaacttcgggagaatgatttggatatccatgccctgttcaacaactatgtacctaatccagtcttggttattattgatgtccaacctaaagagttggggatcccaaccaaagcttac

SEQ ID NO: 1714 - DNA, 399 bp, Lilium asiatic
ctggaacaccctcggcgaatgcaagtacaccatccaggatggggatgctcacaccaactgggtctcttgcgtccgcttcagccccaatgcctttgcccccaccatcgtctccggctcttgggaccgcaccgtcaaggtgtggaacctctccaactgcaagctgcgcagcaccctggctggccatggcggctatgttaacactgtcgccgtcagccctgatggttcactgtgtgcaagcggtggtaaggatggggtgaccttgctatgggatctggcggaggggaagcggctctactcacttgatgctggggctatcattcatgctctctgcttcagccccaaccgctactggctctgtgctgccactcaggacactgttaagatctgggatctggagag

SEQ ID NO: 1715 - DNA, 300 bp, Lilium asiatic
cggacgcgtgggcggacgcgtgggtttgattttgaaactgaaggcaagaagtttgttatttggggtttaactgcgagcatcctgattcgggcagcatcagtggtgtaccagcgatcaccttcgttccttgagcagcagcccaagttcaggtaccctagattcatgaatggccgagtagaagggccttagatttggaatgtaagttcctagctctgtaaacaacttatataactgaacgtatatattttatgtgaacctgacattcatatttaccagttgtgtgtctataattcttttcct

SEQ ID NO: 1716 - DNA, 401 bp, Lilium asiatic
gtaccaccgacccatctgttaccaattggatgaacacacgcaggacaaggaacaccatcccaagtgtctcttcgtaaatgccttcttatgcatggtttgcttccattatggtagctgaattgctttatgaaaggcactatgtgaactactgctaaaaagtcacgaaacaccgacgtataagtagcaacaatagtaaaaacggatttaacaattgattgacatggtccggtggagcgttgttgaggtgattgtgaaggatccgctagagcacaaagaggttgcagtggtagaacacaagcatactcatcactaatagactcacagactaaatattagtaatgggggagatttgagagtggaaaaaacttcaaagaaagaaggtaataatgactcagatgaat

SEQ ID NO: 1717 - DNA, 377 bp, Lilium asiatic
gttccaccgacccatcttttaccaattggttttacacacgcaggacacggaagaccatgggaagtgtctattggtaaatgccttcatatgcatggattgcttccattatgacagctgaattgctttatgaaaggcactatgtgaactactgataaaaagtcacgaaacacccacgtataagtatcaacaatattaaaaacatatttaacaattgattgacatggtactgtggagcgatgttgacgtgattgtgaatgatccgctttagcacatagaggttgcagagcaagaacacatgcatactcataactaatagactcacagactaaatattattaatgtgggagatctgagagtggaaaaaacttcaaagaaag

SEQ ID NO: 1718 - DNA, 408 bp, Lilium asiatic
  modified_base (373)..(373): a, c, g, t, unknown, or other
  modified_base (386)..(386): a, c, g, t, unknown, or other
atttgtaggaggttgtcttaggtcactggaatcaaaatgggaaacctcctatgcagaatgttttgtaatatgtttttcataaggcataagaaaaattagcataggcaaagaaatgggtcaaacctcatgttgagactgctaagatgaaatggattcctgttaaggagaaattggttctcctcaagaaaatgtagaacataatgtacaaaaggtatcaacaaggtgttaatgaattcaacctcatattgagattgctaagatgaaatggatttccgttaaggagaaattggttgtcctcaaggaaaatgcagaaccttatgtacaaattggttgtcttcaaaatgttggtcatgtagctgcaagcctacaacanagagaatcaacantggtggtgatgctacacatgta

SEQ ID NO: 1719 - DNA, 379 bp, Lilium asiatic
cgcgctcatcttttacaccctgaccggacactctatggtcccacatgcttcctataaggacgcgcgggacctgtctgccctacaacatacaatttaccttgctaggcgccgccggctgttctctatatcaacaataattccattcgaacgtttctcctttccactcgccgaaatcactgtttaacagcgtagcaaacaaaacaactcatcagctccgcagaagctctgttttaacttttaatggtactgacgccaaagcagggaactacttgaccattgtgtgcgttgtcatttatacacaacacatgtgaacgtattaccctgcataaatatgcatgtcacttattatggacatgtggaatatctatagcaccactat

SEQ ID NO: 1720 - DNA, 258 bp, Lilium asiatic
ggacgagccacgcctacattcactcctcccttaacattaagtttaacgtttcaaaagtactaaaattacttggacctggtcctcatcaatataccgtgaaaccaatccttctttatctcatctaagaccctgacctcgatttgaggtactactctaaccaaacgctgcaggcgtgcgatcaaataattgtgtggagctaactatacatgtgcccgactacttaaaataagatgcctcatagaccaactatggattacc

SEQ ID NO: 1721 - DNA, 226 bp, Lilium asiatic
acccacgcgtccgctccacttggtgtaatttaatctcttaaattgcctttttttcctaacagagattatcatgggccggggcatttacaactagcttcaatgccatccttactccaattttagtgttcatctgttacaccttaggcccctcctgacgctgactttctatagctgcttctcgcctagcaacctcacggatataccgaccgataccttcctgaagctt

SEQ ID NO: 1722 - DNA, 439 bp, Lilium asiatic
ggtactagttcgttaatgaatttgaaaccccttcaaacaaaatctgataattgataatttttctgtttcgtagtttgttatatgttgctttttatagaaactatttaaatttgttgtcttgttttcatctaatctctttcaatatttagatgaaatctgtgtttttatcacaagtttttggtgatgatccgtttcatgtcaggtcttccagacaagctaagtgtagatatttgtcacgaggtttaatatatttcttctgttataatctgaaactaatgccagtttgaaagtctatacttcttgtttctgtctctctgcaatttccagttaacagatgaatctacgggtgtgtgagtgcttatgcaatgaaccgagtgtcagataagggtgggtgatgcaaatggaagttgggtgctttacttgctagatttaagtggga

SEQ ID NO: 1723 - DNA, 411 bp, Lilium asiatic
catgtagctccgtctgagaagcacccggtgtagtttactagagggattttctcaaactcaagttagtacattagccattaaggataacttacttgtagctggtggatttcatggagaacttatatgcaagtacctagatcgacctggaataagcttttgctgccgaactacctatgatgaaaatgcaatcacaaacgccttggagatttatgacagttccagtggtgctattcacttcatggcttcaaataatgattctggagttcgagactatgatgttgaaaagttccagcttcgtaatcatttccgtttcgagtggccagtaaaccatacatcaattagtccagatcggaaacttgtcgtcgttgttggagatagccccgagggactactggtggatgctaatactgg

SEQ ID NO: 1724 - DNA, 287 bp, Lilium asiatic
tcgctttttaatcatatttataagcccttcatttataaaactgataatatttcatcggactcagtcaccttctttagtatcttaaaaccacataaaactatctaaatatagtatctagactacatataaactttccgaatatctacatacaattgtcatataatacacactatcttttatgacacttcccttcatgtcacgtcttccaaacaatgctaagttcacatatttcttacaaactctaatatattacctctgttataatatgaaactaatgccagctttaa

SEQ ID NO: 1725 - DNA, 379 bp, Lilium asiatic
cggacgcgtgggtccggtgaagctggccaaggtgaaggccacgaaggctcccaaggaaaggaaggccgtgacgaagaagccggccctacatcctacctatctcgagatgatccgcgaggcgatagcgtccctcaaggagcgaaccgggtcaagccagtacgcgatctcaaagtttgtagaagacaagcacaaggctcacctcccggccaactttaagaagatcctcctcgttcagctgcggaaactcactgctgctggcaaactcaccaaggtcaagaactcctacaagatcgctgcaaagcctgttgcttcagtgaagaagacatctgtctctgccaagccgaagataaagtctgctgctgctaagccgaagtccact

SEQ ID NO: 1726 - DNA, 397 bp, Lilium asiatic
tcgctgactcatgaatccggtgaagctggccaacgtgaacgccacgaaggctcccggggtggggaaggccgtgacgaataatccgtccctacataactacctatctagagatgatccgggaggcaattgcgctcctcaaggagcgaaccgaaacaaggccagtactatgatctcaaagttggtggaaaacaagcacatggctcaccttccggacaactttaagaagatacttctggttcaacggcgaaaactcactgctgctggcaaactcaccaaggtgacgaactcctacaagatccctgcagagcctgttgctttagagaagaacacatacggatgtgtcaagccgaagatgaagtctgcatgctgctaaaccgaagtccacatatgtgaaggc

SEQ ID NO: 1727 - DNA, 279 bp, Lilium asiatic
gggggacccacgcgtccgcatagtcttaatgtgcccgcgttctagaatcaatccattctctgcttcatggtgtgcttgctactcttttccccaagatacactcaaaagtcccttcaccgctatataacacttcttgaggggtcttaaacctttggggcgaggatgattactgtgcacaacttgttgagaatgctttcctcccattttagcccctaatatatgtttcccgtgaatatcttgcacgcttgctcttcttgtgcatgctgctgggtcactaca

SEQ ID NO: 1728 - DNA, 352 bp, Lilium asiatic
cgcaaatctgtcagaggaggatagtaagaatcgtttgctgtttactgcaagttgcattcgggtttggagcgatttttttattatgtttagatgtttgccctccggaggtcgagttttttttactatattgtacaatagtcacaaaaaacagttaattttcagcgtttaatttaatcatgttggattcgttcagcaacttttctgcagtagccatggctgtatactattctgttagaactgtttgttaaatctacgtaaagagctacagaaataagttaagtagactcgtctatagaaggacgggtcttgtgcagtggtgacagctatctcaatgattcacgttgttagaagc

SEQ ID NO: 1729 - DNA, 414 bp, Lilium asiatic
cggggacgcgccacgcgtacggccgtgaagctgctttgatgaactttcgcatgaaaaggaaagatagatgcttcggagaagaaagttaggtatgatagcaggaagaagctcgcacagcaaaagccaagagttaagggacaatttgtaagccaaaagctgaactcagctacaacaacagacgcagaagctgactcgtgaccggcgtcaagtaatcactgtaacttattcttccatttcgaccaggtgtgggcaatcggacttgtaagactgaaggctggcaaaagttttttcccttccatggtttagctttctgcacaacgggctaaactcttgtgtcgggcgtttggtgcccgtgtggccttatttttggaaagtgcatcaaattgacaaatgttcagaggggaatgggttggg

SEQ ID NO: 1730 - DNA, 403 bp, Lilium asiatic
tgaagatgattacagctccgatactcggcctcctcgccatcatcggggtgctgactccatctatcttggcgaatccctatcgcaattctctcaagtccggggaaagtctaaaagccttcgaagctctgagctacaagaacttccttttcataatgcagccaaactgcaacctcgtcctctaccatgatgccaccgcagtgtggtcgaccaagaccggcggccaagattacggttgttacgccacattgcacaacggcggcaacctggtcgtctacagccccaacgccgtacccctgtggcagagcggcaacggaaccacaggaggggaatatgttattcttcttcaaaagaacggagatgccgtcatcttcggcactgctaaatggtgggtggtatggcctac

SEQ ID NO: 1731 - DNA, 295 bp, Lilium asiatic
acccacgcatccacgcaatacattcgcacaggaaactatatcgtatatacttaaccaacacgagccactgggtttcggacgatctacatatgatgcagactcccctaaccctccagaagacgaatatctttcactatatcgttcaataataacaaaaaacaaaaaaccttcactgtataatataatcatgatggcatcgataattacctattcattcactacccatagatgtcatactacacttttcaaacaacctgtctaacccacttacaaacctaccccaacaattttcatt

SEQ ID NO: 1732 - DNA, 376 bp, Lilium asiatic
actgggtgccagaagaagctcgagatcgatgatgactcgaagcttcgggctttttatgacaagcgtatctcccaggaagtcaatggtgatgctctaggagaggagttcaagggatatgttttcaaaatcatgggaagatgtgacaagcaaggcttcccaatgaagcagggtgttcttactcctggccgtgtgagacttctgctacacagaggaactccttgtttccgtggatttggtaggcgcaatggagagcgcaggaggaaatctgttcgtgggtgcattgtcagtcctgacctgtcagtcatcaacttggtcattgtcaagaaaggtgataatgatcttcctggtcttactgatgttgagaagcccagaatga

SEQ ID NO: 1733 - DNA, 395 bp, Lilium asiatic
ggagccttataggtctggacgtacggcctttgccccacctgcttatgaccccagatatgtctctccgtatgaccctccagcaaatgatccttacgcaccaccttctggacgtgctcctgcaccagaacctcgccgtttggtgcatcccaatgatccatactattctgcccctccaactgatcaatatcatcaagttgatggacgagcatactatccagaaagtcaatcctaccctgagcgttatcaggagatggtttcaagggatcccccaccacaagctccttcaagggactaccgctctgttagtggtccttactattctgaacatgctggtgctaatgctgcctatcaagcaccacgcggctttgagtatgatgctcccggccgctcatatg

SEQ ID NO: 1734 - DNA, 401 bp, Lilium asiatic
gcgccgggaaaagcgatgagtccgttatggctttgaacgatttcactttctataacgaggggacatgccaggagatcattagagatactctactatagaagggacacagatatcttattaaatgcatgaatggatgtgtcacaagagggtcacaaattgagatcactgaggaagacaacttcattgctgaacggcaagatagcatggatcgtgcgccagctcgtagctcccgaaatctgacatataatgatgccctgacctatgtgaagcttgtgagaactatatctcacgacagagtggatacatacgaggaggtccatgaggtcgtatacgagctcaagagcgagagaatcgacaccaatggcattgtgacgaaagcgacaaaagcgttcaagggacac

SEQ ID NO: 1735 - DNA, 430 bp, Lilium asiatic
cggacgcgtgggtgaacagttgcataagatacttatccaacacgatgcacttctttcggtgcggtctacatcaaatgcagtttcccgtaatggtgaagaagaggaagaggatgcagaatgtctttttagaagaatacgtaaaggaaaagcctgcgctgaagagcattcagaagagttcatgggttcttccagatttattcctgaggataagatgcatcggccactttccatacaaccgttcgagcccgatagcaaaccgctcccaacagtctccattccaccaccggccacgatagtctcagtcccaccgctcccaacaggctcccttccgccaccacccgccaagcacctggagcgggagagatttttcaaggagaaacaaacagatggttcgggcatggcagatcacatgagagacctttccctacac

SEQ ID NO: 1736 - DNA, 185 bp, Lilium asiatic
ccacgcacccacgcgtgcgcgggaatattttataactcaattataactctccgcttaggcctttaaaatgggagcgtatacaccatgttgaccatcattatgctacatattagaaacatacattatgtcacaaacacgtctcgcgtatagcgctcctataatactcctctcgtgtgcgatatctc

SEQ ID NO: 1737 - DNA, 421 bp, Lilium asiatic
ggaaccgtgaggtttaatctggatcccttcaatgagcacaatgatgcacatctttgggaggctttggagagagcacatctaaaagatgcaattcggaggaacgcgttgggccttgatgctgaggtttctgaggctggggaaaattttagtgttggacaaaggcaacttcttagtctcgctcgtgctttgctacggagatcaaaaattcttgttcttgatgaagcaacagcagccgtggatgttagaacagatgctcttattcaaaagacaattcgagaagaattcaaatcctgcacaatgctcataatagcccatcgtctgaatactattatcgattgtgatcgggttcttctcctcagctctggcaaggtcttggagtttgacaccccagaggaacttcttgcaaacgaaaacagtgcat

SEQ ID NO: 1738 - DNA, 259 bp, Lilium asiatic
gaacaggccgcttgctaccaagtacgagatccaagggttcccaaccatcaagatcttgagggaccaggggaagaacattcaggaatacacgggccctatggaggctgatggcattgtcgattacttgaaaaagcaagttggccctgcgtccaaagagatcaagtcaccggaagatgcggtggcccttatcgatgacaagaagatctacattggtggtatcttcgcagaattcagcggcactgaattcacaaacttcatg

SEQ ID NO: 1739 - DNA, 433 bp, Lilium asiatic
cggacgcgtgggtttgttttaaacctaaataaaatatccttgtttaggcattaaagatgacaatccaaacaaagtttgcaacaacaatgtttaacatcttaaagacatacatcaagacaaaaacaggactcgcataaagccttagataataccaatcttgtttgcaatatccagggcatcataatctggagtcagtcggacataagccttctttgttccatcaggcctgatcagggtgttcactttttttgtctgaatatcatacatcttcttcacagcagctttaatcttcttcttgtcagctcggatgtcaacaatgaaaacaagagtgttgttgtcttcaatctttttcatggcagactcagtggtcagtggatacttgaggatctggtagtgatctagcttgttccttgaggggcactgattctgggta

SEQ ID NO: 1740 - DNA, 381 bp, Lilium asiatic
  modified_base (334)..(334): a, c, g, t, unknown, or other
acaggatggagatatgataagcattgatgtgcagaagaggcgaatggatgttgcattcaccgaagagcagtttgaagagagacgaaacaaatggatccagcctccttacaaagccagacgtatatacaaaatgttcatgtttcttatatgaattctgtagcccagctattctttttcttatttcttttttttcccacagtatatcaagaagaatggaaaaccgctggagtagttcaggttgatagaaactctaagatgatattcattgtgttaggatataatttcaaacttgtgaatatattaatatcgtcgaggtcgagatcgatcctgttgntgtcttcaatctttttcatggcaaactaagtggtcagtggatacttg

SEQ ID NO: 1741 - DNA, 310 bp, Lilium asiatic
acaggacggagatatgataagcactgatttgcagaataggcgaatggatgttgcattcggcgaagggcactttgaagagagacgaaacaaatagatccagtcctccttccaagccagacgtatatacaatatgttcatgtctcttatatgaacactgtagcccagctattctttttcatatttattttttttcccacagtctatcaagaagaatggaaaaccgctgcagtacatcacgttgactgaaactgtaagaagatatttattgtgttaggatataacttcaaacttgtgcatatatgaatatctg

SEQ ID NO: 1742 - DNA, 381 bp, Lilium asiatic
acggagaagttaatgttaacaacatttctattggatggtatcagtcttgcttgctgggatcgggtcaaactgttgagctgattcaaacatttatgaactatcaagagagcattacgagatgtgtgtgcattgtctatgacccatctagatctagtcaaggcgtgctaactctcaaagccttaaagcttacagactcgtttatggatctttaccgtaacaatggtttaactggggagaagttaagggagaagaaattgtcctgggttgatatttttgaggagataccaataaaagtttccaactcagcgcttgtcagagcctttatgaatgagcttgaacctgaatcacctcgttcccaatgtgacctggaccgacttaaat

SEQ ID NO: 1743 - DNA, 413 bp, Lilium asiatic
agcagatatatgattacgaagaacaactagaagaagtaacgaatcaaatagagaaaacagagatgctaattgaggagaagaagaagctatacccgattgcttatcagcttcacaaagataaaaaaggatcggaaacaagccttctaccaaacagttgcgaagacgataaagagagcccccgaacagccgctggcaagccgctattgtcttcagttccacgcttcatgacttctacagcctgtagcaggcaaaggaaaaacagagttgtcgaaacaataaatagcaaaggaaggacatcaaaattgcaaaacagcgatccagtgaatttcgcaggatcacggtcgcttaccaatttgaatctttattctaaaacaaaactcccaatcatgaagaccaaactagctgcatttgag

SEQ ID NO: 1744 - DNA, 359 bp, Lilium asiatic
gcaacagcagctcgagagaggatattgatatggcgctcgcgaaggcaaaggacctcgctgcctccaaccccgtcgtcgttttcagcaagtcatactgtccctactgtacccgcgttaaggagttgctggtgaagttgaaggcaactcacaaagtgattgaattggatctggaaagtgatggatcggcaatacaagctgcactagctgagtggaccggacaaaggaccgtgccaaatgttttcatcggtgggaagcatatcggtggttgtgataagaccatggagctgtacaactctggcaagctgcagccgctgttggtggaagctggcactcttgctgcttagatgttggtatggtgt

SEQ ID NO: 1745 - DNA, 427 bp, Lilium asiatic
gcaacagcagctcgagagaggatattgatatggcgctcgcgaaggcaaaggagctcggtgcctccaaccccgtcgtcgttttcagcaagtcatactgtccctactgtacccgggttaaggagttgctggtgaagttgaaggcaactcacaaagtgattgaattggatctggaaagtgatggatcggcaatacaggctgcactagctgagtggaccggacaaaggaccgtgccgaatgttttcatcggtgggaagcatatcggtggttgtgataagaccatggagctgtacaactctggcaagctgcagccgctgttggtggaggctggcgctcttgctgcttacatgttggtatggtgtgtttgtatgcaatgctaaagaataagatgacagtatggtgttggctacctgatattgccatctagcta

SEQ ID NO: 1746 - DNA, 349 bp, Lilium asiatic
ccaggtttgaggagctgaacatcgatctgtttaggaagtgtatggaacctgttgaaaagtgtctcagggatgccaagatggacaagagtagtgttcatgatgttgctcttgttggtggatctaccagtattcctaaggtccagcaattgctgcaggactttttcaatggtaaggagttgtgcaagagcatcaaccctgatgaagcacttgcttatggtgctgctgtccaggctgttattctgactggtgagggaaatgagaaggttcatgacctacttttactggatgttacccctatgtctcttggactcgagactgcttgaggagtgatgactgttctgatccacag

SEQ ID NO: 1747 - DNA, 409 bp, Lilium asiatic
  modified_base (275)..(275): a, c, g, t, unknown, or other
  modified_base (295)..(295): a, c, g, t, unknown, or other
gtttctgtttgaataccacccaactctaaagcagcttttgcagtagttcaaggaagatgggacaggttctgagctggcagctgtaacaatgaaaatcatgcaagccttacaaaataatttagaagcaaaagcaaaacaatacaaggatcctgcattgatgcacatatttttgatgaacaacattcactatattgtcaaatctgtccgcagatcagaggccaaagatttgttgggtgatgactggattcaaaggcacccgaaagattgtacaacanaatgccaatcactatagaangattgcttgcgcgaatgcgatgcaatgcctctctgtcaaggtttgacttcattacgcggtagtggtcatgtaggaagtgatggtggcaatagcagtggagcttcaagaacagct

SEQ ID NO: 1748 - DNA, 249 bp, Lilium asiatic
atcacacacaagacacaaccccactcacccggcagggaggccctcttcgtcggcggaggccatggtttccctcaagccgcagaagaggctcgccgcgggagtcctaaaatgtggcaaggggaaggtgtggcttgaccccaacgaggtctacgagatctcgatggctaactcgcgtcagaacattcgtaagctggtgaaggatggattcataattaagaagccacagaaaatccactcaaggtcccgggc

SEQ ID NO: 1749 - DNA, 243 bp, Lilium asiatic
atgataaagctttttaaaataaaggaccagaagagggaagatgctggaaatgctgctggaagaggtcctataaagaagcaaagtccaggggaattgcgtgttcaaaaagatattggtgagttgaacctacctaaaactactaccataacatttcccaatggcaaggatgatctgatgaactttgaaatcagcattcggcccgatgaaggatattatctaggtggcacatttacttttactttt

SEQ ID NO: 1750 - DNA, 420 bp, Lilium asiatic
ctcatttgctctcttcacacctttggccactccctcttttcacctagtctaacctcacagtgaatgccggaacaaattcttatctgttactaaagtggctccaaagtggattcggacccatcggtttgtgcaagtgggtaaatgggcaatatgatctgatgcttctccactggttgctgaaggcccaaattcaaattcttaggtcacctgcataatttttcatcacatcacttgcactttttttaaaaacaattttaggcttcaactaaaaacaattttaggcttgtatggttgagtaaccttctacacccaaatctgttattgaccatggttgtactgcggataaacatcattgcatggctgttatgcccattatggactatcttattggacctatcactattggcaagtgttgtaaaa

SEQ ID NO: 1751 - DNA, 358 bp, Lilium asiatic
ctcatttgctctcttcacacctttggccattccctcttttcacctagtctaacctcacggggaatgccgtaacaaattcttatctgttactaaagtggctccaaagtggattcggacccatcggtttgtgcaagtgggtaaatgggcaatatgatctgatgcttctccactggttgctgtaggcccaaattcaaattcttaggtcacctgcataatttttcatcacatcacttgcactttttttaaaaacaattttaggcttcaactaaaaacaattttaggcttctatggttgagtaaccttctacacccaaatctgttattgaccatggttgtactgcggataaacatcatggcat

SEQ ID NO: 1752 - DNA, 367 bp, Lilium asiatic
  modified_base (240)..(240): a, c, g, t, unknown, or other
agcgttcaagcactaatccacctctcaggtttgggttccgtccccccatcccgggtcaggccgaacaacaagggtaagggcggtaagaaccccaagcggcataagaacgctgtcgacgatcagaagcgcgagcttgtctgcaacgaggatggccaggagttcgaccagatcctgaagatgctcgccaacggccgacagcaagtcatgtgcatcgactgatccaagctcctctgacatatncaactccagatgcgacaacaaggtctggatcgcccaaggcgacatcgttatagtcggcctacgcgactaccaagatgagaaggctgacgtcatgctgaactacatgcctgatgaggcccgtcttctg

SEQ ID NO: 1753 - DNA, 424 bp, Lilium asiatic
gtatcattgaccctcacactcctgactatcttacgcatcagccccttgatgcaggcttgagtgccattgtggaatcttgcaaaagccttagacgactttctgtctcgggccttctcacagaccgtgtcttcaaatcaattggggacttcgcagatcgccttgagatgctctctgtcgcctttgctggcgaaactgacgcgggtctccattatattctttcggggtgcaagagtttacgtaagcttgagattagggactgcccatttggagacaaggcgctattgaacaacactgcgaagctggagacaatgcgatccctttggatgtcatcgtgctctgtaagcttgggggcctgcaggttactggctaggaagatgccgcagctgaacgttgaggtcatcgatgagaaaagagtttcatggga

SEQ ID NO: 1754 - DNA, 399 bp, Lilium asiatic
ggactacgaagctggcgaaacgtctcaacgtatgcggtctcatgaactgccaatatgcaattacggcttctggtgatgtctacctacttgaggcaaacccgcgtgcttcccgcacggtgccctttgtttccaaagctattgggcatcctttagcaaaatacgcttcgcttgtaatgtccggcaagagtttgtttgatatcggattcacaagcgaggtggtccctgcacatgtttcagtcaaggaggctgtgcttccattcgagaagttccaaggctgtgatatttttcttggaccggagatgcgtaacactggcgaggtcatggggatcgactttgagttccctgttgctttcgctaaggcacagattgccgctggacagaagcttccgattggtggga

SEQ ID NO: 1755 - DNA, 326 bp, Lilium asiatic
gactacaactcaaacgttaacgtatgcgctatgaactgcgttgcggtacgtttgggatgtctacctacttgggcaacccgcgtgcttccgacgggccctttgttcaaagctattggcatctttacaaaatacgctccttgtatgtcgcaagagtttgttgatatcgattacaagcagggtctgcatgtttatcaagagtgcttattgaagtcaagtggattttttcttgaccgaatctacactgcagcatggatcattgattctgtgttcctaagacaatgcgtgaaaacttcatggtggacggtctactgacactgacacgtatt

SEQ ID NO: 1756 - DNA, 389 bp, Lilium asiatic
  modified_base (353)..(353): a, c, g, t, unknown, or other
gtcgaaccttctgccaagaccaaatctaaggcagaagcaaagtctgagaaaccaaaaccagaagagtctgatgatgatgattctgaggatgatgatgagtctggtggtgactcttatagcgaagatgaggccatgcctgatgctgggggtgacagtgatgatgaacaggatgatgatgattgttcaaatgaagaagatgttactcctaaaaaggatgaagttagcatgaagagagctggtgattcttccaacaaatcatctgcacctgagaagaaggcgagaccagtaactcctgctaccaagaaatctgatggggatggcaaaaaaagggtgccatactgcgactacatacnctaaacaggttggaaagaatgcttacaacactgaga

SEQ ID NO: 1757 - DNA, 422 bp, Lilium asiatic
gccagatgaaaggcttaatgacattgtagggagtgcatattatgttgctcctgaagttctgcatagatcctacaacacagaagctgatgtctggagtatcggcgttattgcttatattcttctttgcggaagtcggccattttgggcccgaactgagtctggcatcttcagggctgtgttaaaagcaaatccttgttttaatgagccaccttggccttctttgtctcctgaagcaaaagatttcgttaagcgattgttgagtaaagatccaagaagaagaatgactgctgctcaagccttaataaaatttcctttttattgttctgcaggccatccttggattagaaattataatggtgtaaaaattcccttggatatccttacattccgacttatgaaggcctacatcagatcatcatcat

SEQ ID NO: 1758 - DNA, 408 bp, Lilium asiatic
cggacgcgtggggccgtcgaactggaagacgaggatctgtaacaagtgggagctgactgggtactgcccatttggtagcaagtgccacttcgcccatggtgtagcagaactccacagatatggtggggggcttatggaaactgaaggtagagatgcttcttcagccgtgccagactcgagacatgctggggcaactgctaggatgccattggacaatgttgtcacatcgaacgcaacagggcctcatgcagatgtttatcatttgggagttcccgcacaaaggtcagttggtgtcagccagagggtggggcagaggcctcttcagaaatggaaaggccccgacaagattagcagaatttatggtgactggattgatgaaaatgactagcggcccacttttacatagtg

SEQ ID NO: 1759 - DNA, 364 bp, Lilium asiatic
gcgtccgggcaaaactgggtcggacgaatccatccctatgattcccatttcctatccatcgccatcgcagagcagcagctgctgcaagctgaatttgatgactgtgtatctgcaaactctagcggtgccacatgctgccgatccattgctttaattgtgatgttccttttgctcgtacgccatgtaattgtcattgtgagggatgttagcatgctacaagatgcaacggtgctgttcagcgcaactcttcagtttgcgggaggccttctttcttgttatgtaatagctcgttcttgctacgctttgcagcatcggagacggagacaggtgtagggagactcacctgaaccttaaaagaacacaa

SEQ ID NO: 1760 - DNA, 355 bp, Lilium asiatic
gccagatgaaaggcttaatgacattgtagggagcgcatattatgctgctcctgaaggggtgcatggatcctacaacacagaagctgatgtctgaagtatcggcgttattgcttatattcttatttgcggaaatcggtcattttgcgcccgaactgagtctgacatcatataaagctgtgctaaaagcaaatccttgttttaatgagacaccttgtccttctttgactgctgaaccaaaaaatttcgttaagcgattgatgagttaacatccaagaagaagaatgacagctgctcaagccataataaaatttcctttttattgatctgccagccatgcttgtattagacactatta

SEQ ID NO: 1761 - DNA, 394 bp, Lilium asiatic
cccacgcgtacggcttccaccccatgcgatgcttgggactcaacaaccgctccagtcggggccctagaactctgccgccgcagtgcaacacatcctcactccccggcgcgatgctcggcacccgccccaccacgtcctcggcatgatgctcggcgcatgcccccacccctgtgacaatgtgacaccagcccacccctacctagctctacatatccacgtcgggcagccaatgacggagccctggaggaggatatcggatggacgaccaaggagaaagatgcctcgcctcgttgtcttcttcggcgtacgttcttcaagctccaacccccacccaagtagctcgactgctccccaaaagatgtgcagaggcgaccaggcttgtcaaaaccggaac

SEQ ID NO: 1762 - DNA, 428 bp, Lilium asiatic
  modified_base (404)..(405): a, c, g, t, unknown, or other
ctagctcaccaattactatggcgctgccgtcatctactgtagatattaaaattcctggacaagggtatgcatcggagatgaaatcttctccctcgcctgcagctcctgttcaagtcatggatttgcttgatagtttatcatcaagtacatctattcgagaagaagatccagtctatccgtctgtcacggctttccagagcagctcattgaagattacattcaacttcacaaagcagcccgggaaaccacaagttaccacaatcaatgctactttcacaaatttgtcatctaatacatacacagatttcatttttcaagcagctgttccaaagtttgttcagttgcatttaagtccagctagcaacaacatccttccagctaatgggcactggtcaattacacannacttaaggtgtactaatacccta

SEQ ID NO: 1763 - DNA, 425 bp, Lilium asiatic
agccagatgaaaggcttaatgacattgtagggagtgcatattatgttgctcctgaagttgggcatagggcctacaacacagaagctgatgtctgtagtatcggcgttattgcttatattcttctttgcggaagtcggccattttgggcccgaactgagtctggcatcttcagggctgtgttaaaagcaaatccttgttttaatgagccaccttggccttctttgtctcctgaagcaaaagatttcgttaagcgattgttgagtaaagatccaagaagaagaatgactgctgctcaagccttaataaaatttcctttttattgttctgcacgccatccttggattagaaattataatggtgtaaaaattcccttggatattcttacattccgacttatgaaggcctacatcagatcatcatcatta

SEQ ID NO: 1764 - DNA, 420 bp, Lilium asiatic
gtttaatgggtttcgtttctggaatactcttctcctactactgctgcttgtctgtaggtcagtgccggaggagttgatcagcgtcgacgtgcacgctgcttatgacctcatcaacaccggcaaacaccgctacttggacgtcaggacggtggaggaattcaataaaggtcaccctgttgaggatgccattaacgttccttacatgctcttcaccccggaagggaagacaaaaaatccaaagtttttggaggaggtcgcttcagttttaaacaaggacgaacacgtagtagtgggatgccaaagtggagtgcggtctcaccacgcagcagtggatcttcttgacactggttttaagcatataaagaatatggcgggtggctatgccatgtgggtagagaatggatatcttgtgaaaaagca

SEQ ID NO: 1765 - DNA, 333 bp, Lilium asiatic
gggcagtagtgatgcaatgatattgtggagctctgtgttgtgttatggagaagtgttgattgtatgttggcatgaagaagctctatgttactatagtgtttgtgtagaagattagttgtgttgagaagacgcttgatactaaagtattgatatgagtttgtctggagctcttgcatgttaaggagaatgatgcagatggtgaagcctgtttataggaaatggagcaactgccctcaccagcaccttacctttgtcagagcagccaggcagaggatgttcctcttcctagggtggctctgactagttggtgggctggtggtgactctcatggat

SEQ ID NO: 1766 - DNA, 302 bp, Lilium asiatic
gagccaatcatagacaggcttccttaatgtctctatggccgtctaccgccttttattcaaggaatatcacactcacccctgttcaactatagattgctagaagatactgaacgcgggtttgaaaggctgttgtagaggcatgtatgtgaaatgggacaagccgggataatctcattacattaacgaaaagatatacctaggctgcaagcaataccacaatttttaacagccatgccttcaagagtattttactacagtgaagtgggcctcactctatatgtcaacagggagaaggttgatct

SEQ ID NO: 1767 - DNA, 223 bp, Lilium asiatic
ctctcttgttcctctccggcttttccttcccctccgcctccgccacgccacctcccctcccctcccgccgtgcgccccgatccctcgccgccccacgccggcctcatctcgccgaggactggatcgccggggggacatcctgggtgtccttcacacacatgcggcgttaggtgatgacgagcttgcctgagaggggagaatcacctgtgccgccactcgattc

SEQ ID NO: 1768 - DNA, 427 bp, Lilium asiatic
aaatatcgaaaaaagttagaatagaatcggaagtcttcagagatttctgaaatcctgattattttgcaatttatagttttgaagtgctgattcgtaggaatattaagcataacatgttattaataagaaaacttgtgattagggctgtcatttggaatgggaatttcaacatttccgatatcctatccaaaattttccgactttggcagcctggacagagttccgaattccgtaaatatcgaaaaaagttagattagaatcggaagtcttcagagatttctgaaatcctgattattttccaatttatagttttgaagtgctgattcgtaggaatattaagcataacatgttattaataagaaatcgcaatcttggggagactcgtgtaaatgaaatcttatggatagaactaccatttggaatggaa

SEQ ID NO: 1769 - DNA, 402 bp, Lilium asiatic
ctctcatctttgacagaggatatattggcgttcagcatgattggtgtgaagcatttcctagataggcgataacatacgatatggtgcatgctctaagattgctttcaatcgagtcccataagcacagatgttcccttctcgacatattcttggagatagatcgcattttaatgccagagggctggattatactccgtgatgctgctcctatcatagaaacatctagatctatagcatcacagttgaaatgggaagcacgagtgactgaaattccaagtaacatcaaccagaaactcctcgtttgtcagaagcggctcttcaggatacaactattgtaaatgcattctaccaaaggctgaatgatataatatttcttatataatcacatcattgagttcgaac

SEQ ID NO: 1770 - DNA, 437 bp, Lilium asiatic
  modified_base (419)..(419): a, c, g, t, unknown, or other
ggaacaagggggatccaccgaagaagacccttccctttgttcggaagaaaaagaggatctggacaaaatagatgaaacggaagagatccgggtgaatggaaaggaaaaaacaaaagatgaattccactttaaagagacatcctataaggatagccctgttgacgaagattcttatcttgatgggtatcaagagaattgggaattgggaagacttaaagaagaaaaaaaagaaaagacccatgcccatttccggtttgaaaaacctcttatgactttttttttcgattataaacgatggaatcgtccatttagatatataaaaaatgatctatttgaaaatgctgtacgaaatgaaatgtcacaatattttttttatacatgtccaaagtgatggaaaagaaaaaatatctttacgtatncatcaagttatcaacttt

SEQ ID NO: 1771 - DNA, 460 bp, Lilium asiatic
aattgacggacggacccacgcgtacggaacaagacgcaagtgatggctattgattttccttacaggaaaataatgaagggaccgggaaagtaacatctgccgggatgtactttttacattttcaagtgtaccgaatggattctgcagtcaatgcgttggccgtctcaaaagaccctgatgctgctatatttaaaaggttggaaggtctgcaaccatgtgaagtctctgaattaaaacctggcactcacatttttgcctcttatggtgataatttttttaagcctgctacttataccattgaagctatgtgttcaaaaactttcgaggaatcaacttataagctcaaggagattgaggctcaaattttagcaaagagaaacgatctgcgccagtttgaaacataatacagaagagcattggcacgttttcaagaagtgacaaacaaattctgtcaataaaa

SEQ ID NO: 1772 - DNA, 401 bp, Lilium asiatic
gaacaagaggcaagtggtggctatggattggccttacaggaagatagtgaaaagaccgggaaagtaacatctgccgggatgtactttttacattttcaagtgtaccgtatggattctgcagtcaatgcgttggccgtcgcaaaagaccctgatgctgctttctttaaaaggttggaaggtctgcaaccttgtgaagtctctgaattaaaacctggcactcacatttttgctgtttatggtgataattttttcaagcctgctacgtataccattgaggctatgtgtgcaaaaactttcgaggaatcaactgagaagctcaaggagattgaggctcaaattttagcaaagagaaacgatctgcgccagtttgaaacagaatacagaagagcattggcacgttt

SEQ ID NO: 1773 - DNA, 384 bp, Lilium asiatic
acggtataagaagcaagtggttgctttctattttccttacaagaaaatagagaggggaccgggatagtcacatatgcctgcatgtactttttacattttctagtgtaccgcttggattctgcagtcaatgcgttggacgtgacataagaccttgatcttgctttctttaaatggttggaaggtgtgcaactttgtgaattctctgaattaaaacctgacactcacatttttgctgtttatggtgataattatttcaagcctgctacctataccattgaggctatgcgtgcaaaatctttcgaggaatcaactgagaagattaatgagattgaagctgaacttttagcaaagagaaactatctgagatggtttgaaacagaatac

SEQ ID NO: 1774 - DNA, 418 bp, Lilium asiatic
cggacgcgtggggataatatttcagatatcgcatttgtagacaagatagaagtgaaaggggttttgtacaaactttggaagaatgaattcttggatatggagaaaggagtttcatatgcatccggacagatgcagcaattcttgtggagagtgaacaaaagaacactttgggaacttattcagaacgaattgtatcatggagcattaaatatcagcctaaggattgctcacactgtcaagcaacaacatgaggatgtagtgactgggaaggaaaaagagcaattattaagaagtcgatggatcttggaatcttccctcttgaagattgacgacactcttttggttttcggaaatttctaacaccactctagtattgtcgggttcgatttcctactgctgaaatttagcttacggaata

SEQ ID NO: 1775 - DNA, 230 bp, Lilium asiatic
tcgttggcgcgcgctgttgatgattcaagctttccctttcgagaatacaaagaggtgactggggtattgtgccaactctggacgaatgactgccagcagctggacaacggcgtgacttatgcaaccaatgccgatgcacaacttattggacttagagcacatattatctttgtcggatggtattctaaagaaaaggcatgacaccgaattaacattcaacacttgcatag

SEQ ID NO: 1776 - DNA, 313 bp, Lilium asiatic
ggccgattggcagatcccattatacggttgctttctgttgtgcggggccggttatatcttggaaaacaggatactgtgaatgctaccacacaagtctctaaaacattctatgagaagatatggtagtactgtgatgtaacacttatgtcactggcatatgccgggacacgaaatgttcttaacgttcagaaacttcttggtatgtgctcacagcatctttagaaaggtgaaacacaccaagggccagctgtcctagggattgctcttattgctatggctgaagaaatatgagctgaaatggctgtacgttcac

SEQ ID NO: 1777 - DNA, 426 bp, Lilium asiatic
cggacgcgtgggtggagctgggttccattctggatcctggaaagccacccaaaatggacaaagcagccatccttagtgatgctgcccgcatggtgactcagctaaggagtgaagcccaaaagctgaaggattcaaacgagagtctccaagagaaaattaaggagttgaagtctgagaagagcgagctccgtgatgagaagcagaggttaaagcaagagaaggagaacctggaacaacaagtgaagatgttgagcgctcgcccgagctacatgcctcaccctcctgtattaccagcagctgcctttgctgcacaaggacaacctgctggccacaagatgatgatgccagtcatcagctatcctggatttcccatgtggcagttcatgccaccatctgatgttgatacatcttaggatgctgagtcat

SEQ ID NO: 1778 - DNA, 357 bp, Lilium asiatic
caagaaacctttgagcttgtcttatgcaccttctccaagacatgggaaaggcttgatcctgggtggactgtgtctctgtcgtttgtttatgaaaccaaagtgaatcagacttttcatgctttccctgctgttgtcaagtttcgtgtcccgactgagtccactccattggaggcctactctactcacgatttgccactggatattctagctgatcgggctcctaagaagaaatttgaattgtcaaaaagtcttctagcgaaatatgtatcttttgttttttatgtggggaagattttaccctttttttgttgatttgttgggctgttaatctacattgtattaagcccttttaaatta

SEQ ID NO: 1779 - DNA, 213 bp, Lilium asiatic
acttccactgcgcgaactctctgatcggcattgcctacgagaagaagctgtccaatccggggcggtagataaaggtccagaagctcgtcctcaacatttacgacggcgagagcggctatcgcctaaccagggtctctaatgaagtggagcagttgataggacagacaccggggtatcataaggcgaggaacactgttcgatcatttgggatca

SEQ ID NO: 1780 - DNA, 299 bp, Lilium asiatic
gaaacccggccgacggcgcgtccggctttcactgcgcgaactctctgatcgcctttgctctggagaagaagctgtccaatccgaggcgggagataaaggtccagaagctcgtcctcaacatctccgtcggcgagagcggcgatcgcctcaccagggcctctaaggttttggagcagctgattggacagacgcctgtgttctcgaaggcgaggtacactgttcgatcttttggtatcaggcgtaatgagaagaaagcgtgctatgattctgtgaggggggagaaggctatacaacttttt

SEQ ID NO: 1781 - DNA, 280 bp, Lilium asiatic
cggacgcgtgggcggacgcgtgggcggacgcgtgttctgaagttttatgaacctttatgcgccaagcgatgtgaaattgtgaatggtgtggttgaagtggaatgtgtaacaattgaagcaactgatggaaattcttgctgaagagaaaggtgtgcctcatttgtggttaaatgcactgtaaaccatcgtagttcttgctgatgagattcaagagctggtatgatagacctctgaattttccttaagggcatttaaatggttcaattatattataatttcc

SEQ ID NO: 1782 - DNA, 427 bp, Lilium asiatic
cggacgcgtgggcggacgcgtgggcggacgcgtgggcagaagttttatgaacctttatacaccaagcgatgtgaaattgtgaatggtgtggttgaagtggaaggtgtaacaattgaagcaactgatggaaattctgctgaagagaaaggtgtgcctcatttctggttaaatgcactgaaaaccaacgaagttcttgctgatgagattcaagagcgtgatgaaggagctctgaagttcctcaaggacataaaatggtgcaaaatagataatccaaagggtttcaagcttgagttttacttcgatacaaacccttacttcgagaattctgttctcacgaaaacatatcacatgattgatgaagatgatccaattctagagaaagcaatagggactaagattgtatggtattcaggcaagtgcttgaccc

SEQ ID NO: 1783 - DNA, 429 bp, Lilium asiatic
ctaaagatgatgattcagtggagaatgtcgacttggttcaacagacttcggaccgtgcattaagtttgctgagtggatctattacgtcgaatcatatgggaacatgcctcatggaagaattaatcaataaaacagcgaatgatggggccaacctaataaaattctggttggtcgaagctctgaagcgagagaaaatagcggtaaccacaaaaggtcgttttggttccatcactgcctcagaggttcgcgatcttgttacaaagttatcgttcaacccgaaatctatactccggaacaaagggattattcagatgggtctcgccgctgaaattgcattaagtgaacctcatagttcccggtgggatgcatttgtcagcgctgagagaatattgagtataagttcagcagatactagccgaagtctttcga

SEQ ID NO: 1784 - DNA, 411 bp, Lilium asiatic
  modified_base (285)..(285): a, c, g, t, unknown, or other
aaatcccctgaaatggcggccaccgttgcaatcgagactcccgcctttgctccggtccctgtcgtcggagatgatccggtggcgaagccggccaaggagacaaaggcaaagacccctaaggagaagaaggcctccgttgcaaagaagccagctctccatcctacctatcttgagatgatcagcgaagcaatctcttcgctgaaggagcggactggatctagccagtatgctatttcaaagtttgttgaggacaagcacaagtcccatctcccggcgaacttcaangaaaaggggccccttttttttcccctttttttctttgccagtgcggaactaccgtgtggtaactacaagggaaactctcagacttgcaacaacttgtggagtcagttgagcggagcgattgcgtgt

SEQ ID NO: 1785 - DNA, 83 bp, Lilium asiatic
gaggcagttaatatgaaggggaaggaacacaaaaccttgagacatggaatgtcaactttctggggggtggaataagaggaatt

SEQ ID NO: 1786 - DNA, 286 bp, Lilium asiatic
ctcgtctttcagtcctttcatttctggctgcttctgaagatagggctactggttccattgggccacatagagcatcagcaatgctggcataagctgaacttgtataccttgaaattggagttccagaaagattgtctgtccacgaatctgctctggctttatttcctactatggcaacacttcgtacccacttagagctttggcaatctgaagacaatgaagaaagaactaataataatgccactctccatatggcctgagagggggaagagccgggagttttaaa

SEQ ID NO: 1787 - DNA, 407 bp, Lilium asiatic
  modified_base (285)..(285): a, c, g, t, unknown, or other
  modified_base (367)..(367): a, c, g, t, unknown, or other
  modified_base (395)..(395): a, c, g, t, unknown, or other
ttttcctatacataaaaggtcatgtggcaccttcatcttctgattctggatcatctgggaacataataattgatttctattggggaatggagttgtatcctcgtattggtaaaaactttgatattaaggttttcacaaactgccgatttggtatgatgtcctgggctgttctagctgtgacttattgcatcaaacaatatgaagagaatggcagcgtatctgattccatgcttgtaaatactgtactgatgcttgtgtatatcaccaacattcttttttgggggntttggggggggggggggaaaaaaaaactggatattggtgcacaatggatattgctcatgatcgagctggattctacatatgnctggggatgcttggtatgggtgccatcnatatacacttct

SEQ ID NO: 1788 - DNA, 422 bp, Lilium asiatic
acgtctctcttccccctcatcgttcccaacccccgcggcggcgccaatgacgacggagaaggagagggagaatcacgtctacctcgctaagctcgccgagcaggcggagcgatacgacgaaatggttgagagcatgaagaatgttgctagacttgatttggatctgactgttgaggagaggaacctcctttcagtgggctacaagaatgttattggggctcgcagagcatcatggcgcattatgtcctctattgagcagaaagaggagtcaaaagggaatgatcaaaatgttaaacttatcaaaggctatcgccataaggttggggaggagctctctaagatatgcaatgatatactgactgtcattgataagcatcttattccttcttctggctttggggagccactgtcttctactacaa

SEQ ID NO: 1789 - DNA, 422 bp, Lilium asiatic
cacgcgtccgcggacgcgtgggcgccgccggagcatttcaaccccacccaccaaaatggtcaagtgggctgaaacccaacaaggcggggatcatcctccagggccgtttcgccggccggaaggccgtcatcgtccggaacttcgatgagggcagcagccgcgaccgcccctacggccactgcctcgtcgccggcatctacaagtacccgaagaaggtaatccgcaaggactcggccaagaagacggcaaagaagtcccgcgtcaaggctttcattaaggtggtcaactacaaccatatcatgccgactcgctacaccctagatgtggatcttagggatgttgtcttcgtcgacgtgctgcagtcgaaggacaagaaggtggcggtctggtaagagactaatgcgaggtttgaggagaggttc

SEQ ID NO: 1790 - DNA, 442 bp, Lilium asiatic
ccaaaattctagcaacctgtcgaatccacctatgggctttcaaagggtcagggtctcccttgaatatcgggggatttaagcctttaaactccttaataagcttgggtcgagattcttgattttgcctcacagattgcttgtcttgttgttgagaaatggcagcttgttgttggtgaaggatattagtcatattctggagtacggccaaaagttgtccaaacgggtcctctatattcctaccagaggaggaacgactattatattctcgcaccatctgaaaatggaacaagggctaatgtaagggaagggaacaactcaaaactcaccctaaccagtcctaggctacccgaaaccaaaagctctgataccacttttgtcaagacccgacattctatatcaaataccgggccgcgacgggggtgaaaagaaaagaaaaggggag

SEQ ID NO: 1791 - DNA, 426 bp, Lilium asiatic
gaagaactatttgaatgctcagtacttcggcgagattgccattggctcgcctcctcagaagttcacggtcatctttgataccgggagctccaacttgtggattccctccgccaagtgctatttctcgattgcttgctttttccattccaagtataggtcaagcacatccagcacctatcagaagaatggaaaatctgctgctattcattatggaactggatcagtatctggtttcttcagccaagatcatgttaagattggtggccttgttgtcaaagatcagattttcattgaagctactcgggagccaagtcttacttttgttgtagcaaagtttgatggcctacttgggctgggattcaaaagaaatattacttggggatgttgtgcctgtgtggacaacatgatcgaccagggtcttatgaa

SEQ ID NO: 1792 - DNA, 199 bp, Lilium asiatic
gccacaatgactgctcaaacccaggaggagcgtcttgctgccgctcttgagcagcagaagatcgatccggatgagcctgtggttgaagacgaggatgacgatgatgaggatgacgaagaagatgacgacaaagatgaggatgatgcaaaaggaggtgatggcagtggaaggttaaagtatagcagaagtgagtagaaga

SEQ ID NO: 1793 - DNA, 445 bp, Lilium asiatic
gttgatgggcgagccccatcagcgatctccgcttcgagccctagccatggagtttcatcccgccgtcgatctcccgccaccgatcgaggcttcgcaggtggtgcttgatgtcgagagcagcggctgcgccgacggtgacgggtgtggggaatcagggggaccggcggagagcggcggcatctgcgcgatatgtttgaataggatcctcatccaggagacggctcttgttaagggctgcgagcatgcttactgtgtgacatgcattctgagatgggcaacatacagtcagaaaacttgttgtccccagtgcaagaacccgctcgagttccttaatgttcatcgctcgcttgatggctggatccatgattacatgttcgaggagagcgggtgcctcctccttcgagccacttgggttgtccctttggttgttgagccaaggttttca

SEQ ID NO: 1794 - DNA, 373 bp, Lilium asiatic
accttcgataacgatgtcttcttgctgtggtggaaagtgtggctgcgggtcttcctgcaagtgtggcagtggatgcaatggatgtggtatgtatcctgacttggctgaggggagcactgcctctaccactatgatcatggggtttgctcctgctaagggggagtttgaggggtttgagatgtatgctgagaatggtggctgtggctgcaagtgtggtgataactgcaactgcaacccctgcaagtgtggcaagtgagctctccatgagaggagggaaattgggttttaaaaaaaggggggggggggcttgataccctttgttacttgttctgtgtatgctgataatggccatggtttacatgatgcaactttt

SEQ ID NO: 1795 - DNA, 255 bp, Lilium asiatic
gcagagctctttacagattgacttctgctggttctgaacatgaaacaaagtatgtcattgtgggagagaaggggaaggttcagttggtgcgcgattcaaggcaaaacattcttatgaccgcttctgagctgcagaagattcccgtaaactatactcaggttgctgatcttgctgatgacatcttgaagaatgtcgagtttgatgctctgagggttgtttttcacaatattcaactcggcagtctcatttctacca

SEQ ID NO: 1796 - DNA, 398 bp, Lilium asiatic
  modified_base (347)..(347): a, c, g, t, unknown, or other
  modified_base (355)..(356): a, c, g, t, unknown, or other
aagcaagcactatatgaataaactcaaactgtgaccaaatttgaaataataggtgcaacttagggcatactaggggtaaaatgtagctgtagagacaaccaagatcaagttggaaagaacttattgctgcagagactccctatgagtttatactagctcagatgtgattcttcaggaaatcgaggacaagcttgttcaccagctctggaaattgttcctgcacaaaatgggtcccctcggggacatatatgacttccagatcaaggggggggggaaaccccaaaaaaaaaaaaaaatgctttccttcctccttcctcatatagtcttccatccccgggaatttcatnaaaatagnnctgcttctcccatgatcagcaatgccggcagatttaccctgg

SEQ ID NO: 1797 - DNA, 375 bp, Lilium asiatic
cggacgcgtggggtttcaagtaaaagagaaatcccacaccattacattcaagctttctgatctttagctatggccgaggagcaaagccgcactgttgagtccgccgaggtgaaggaccggggcctgtttgacttctttggcaagaagaaggaggagaaggccgacgaggaggttctcgtcaccggagtcgagaagatacagatagaagatgagaagccagaggaggagaagaagcatactctgtttgacaagctccatgaggataagccggaggaggagaagaagcatactctgctcgataagcttcaccactccggcagctccagtttcagctctttaagcgatgaggagggagctgatgaggagaagaaagag

SEQ ID NO: 1798 - DNA, 437 bp, Lilium asiatic
tcggctcccgcagtctcacttcaaaccctatctccgccgtcgccggagtccacgatgccgcgcgagataatcacgatccaggtggggcaatgcgggaaccagatcgggatggagttctggaagcagctctgcctcgagcacggcatcggcaaggacggcctcctcgaggacttcgccactcagggaggtgacaggaaggatgtttttttctatcaagctgatgatcaacattacattccaagagcccttctgatggatctggaacccagagtcatcaatggaatacagaacagcgagtacagaaatctctacaatcatgaaaatatatttgtttcagaacatggaggcggtgctggaaataattgggctagtggctatcaccagggagaggaggttgttgagtccattatggatatggttgatagagaagctgatgg

SEQ ID NO: 1799 - DNA, 394 bp, Lilium asiatic
gaggagcagaggatcaagcagaggagatgcacatgcagacggaccggatcgagaaccaggagatcaagcaccgatgattgatggctctgatgaagtgaagttctgatcagacggcgaagagtgaggccgtgcatgaagactctagaagcttgtgtgagaggagatcaccattggttgtgcatgcatggtgctcggagaagaagggatgccaggcagaagacgagatctataaagccctaaggacgagcgatgaagttccccaagtctcagacgaagaaattcactcgttctctgagccttcttcattcaggaactctgcttagtgacagagtccagttcggtgaaggagtatgtagtagtcgtattctgttagataatatgaattttttttttt

SEQ ID NO: 1800 - DNA, 376 bp, Lilium asiatic
cggacgcgtgggcaaggctcccctgctcaacgatcagattcaagaattcatagaatcaactccagactatcctcttcattcgaatggactccttaacccaccaaaggcccttgcggacatggttgaatctctccttggagcagtcttcctggacagtaacagctctttagagactgcgtggaaggtatttaggaggttagctgaaccgcttatcgacaatgaaacaattggaatacacccagtgactgagcttcatgagctttgtcagaagacaagaaggcagctgaggtttgagaaagatacttgggaggagaatacaactgttaaggtactaatagatgaaaatgtggtcggaagggcaacttatggcccaaag

SEQ ID NO: 1801 - DNA, 214 bp, Lilium asiatic
gggctctgatgatgtgaaggtacgaggagcagaggatcaagcagaggagatgcacatgcagacggaccggatcgagaaccaggagatcaagcaccgatgattgatggctctgatgaagtgaagttctgatcagacggcgaagagggaggccgtgcatgaagactctagaagcttgtgtgagaggagatcaccattggttgtgcatgcatggtgc

SEQ ID NO: 1802 - DNA, 392 bp, Lilium asiatic
  modified_base (372)..(373): a, c, g, t, unknown, or other
  modified_base (375)..(376): a, c, g, t, unknown, or other
cggacgcgtccgcccacgcgtccgcagaaattcagagccgattcctgaggtcaacaatgagcctgtcaaggtggttgtggctgacagccttcatgatgtggtcatcaactctaagaaaaatgttctgattgaattttatgccccttggtgtgggcattgcaagaagctagctcctatcttagatgaagttgctaccacgttcaaagatgatgatgatgtggtaattgcaaagatggatgctactgcaaatgatgtctcctctgaatttgaggtgcgggttggggggttttttttaaaaaattttttcccctactctgtatttctcttcaacaagtggcaatctcgtgcagtacgatggtggtagggacagcnnanngaaaaattaactttat

SEQ ID NO: 1803 - DNA, 404 bp, Lilium asiatic
  modified_base (390)..(390): a, c, g, t, unknown, or other
  modified_base (398)..(398): a, c, g, t, unknown, or other
gcacatgcaaaatatttgtaagagactgttatcttatcaccagtttgttgcgtatgaaaatgaataccagactcacaagccaagaattatgtggtctagaagcgaaatgtgccaaaagattaacaaaatgtttcacaaatcaaccatatataaatattctggtaaagcatatgcaataagtgtaaaattattttcaagagtattatcttatcaccacttccttactcatgaaaatgtataactcactcacacgccgggaattatgtggtatatatatgctaaacaaaaaaaatttgggggttttgggggggttaaaaatgaacaaaatgtgtcacaaatctaaattaatattcttgtattaaagattcttccttatattcctcatttttnaaattccncaaaaa

SEQ ID NO: 1804 - DNA, 411 bp, Lilium asiatic
gaatgctccaggccattgcttcggaaacaatgcattaagtatctcggccctcaagagcgcgagcattacgaatatgtgcctatagaaggtaacatggtgcatagacaaactggagagcctctcgatacaactagaggacctgaaggtgccaagtggatttttgtgatgagcactgccaaaagattttatgctggtcagaaaaagaaaggtcactttcatcattccagcttcctcgcaggaggtgcaactattgctgctggaagattcaccgcagaaaaaaaaattggggggggaaaagaggggttttttctcaagtctatctgggcatacagtggtcactatcgcccttcagatgagaacctcaaaaacttcttagctttcctcaaggaaaatggcttcaatctgaatgct

SEQ ID NO: 1805 - DNA, 326 bp, Lilium asiatic
tgacaatgtgaaggcaaagattcaggacaaggagggaatccccccggatcagcagaggctcatctttgctgggaagcagcttgaggatggccgcaccctggcggactataatatccaaaaggagtctaccctccacctggtgctccgtctcaggggaggcatgcaaatctttgttaagacgcttactggtaaaacaatcaccctggaggtggagagctcccatacaattgataatgtgaaagctaacatccaggataaggaagggatccctcctgaccagcagaggcttatctttgctgggaagcagctggaggatgggcgcacac

SEQ ID NO: 1806 - DNA, 426 bp, Lilium asiatic
attccatcgacttctctagatggaatcaaggagtggcttgacacgacggatctgaagtactacgagagcaggctgaatctgaattggcgcccgattctgaaaacaatcattgatgatcctgagaagttcatcgaggatggtggatgggagtttctgaatttggaggtaagtgattcagactctgataacagtcaggatacggatcaaggatacgagcctattgatattgagggtgtcttttttcctttattcttctattatagtatgtgaatattcttgtcttggtattaaataattatatctttttattgggtttctttttgggtatatatgcattttattgtattgtttttttttttttagtatttatgttgtgtatatattaatttaatttcatttgcttttaattttttcttatttgttttt

SEQ ID NO: 1807 - DNA, 176 bp, Lilium asiatic
  modified_base (30)..(30): a, c, g, t, unknown, or other
cggaaaaccggggcggccgacgcgcacganaccaacgacgacgatagagggaaacaaggaggggcaagacacgacggaacagaagaggggcgagagcagacagaaacagacaagaccccccattcagaaaacaaagaatgaggagccagagaaggccaaggagggaaggggaaggg

SEQ ID NO: 1808 - DNA, 431 bp, Lilium asiatic
ctcaattctttcagatctctcactaatggcgcccaaggccgagaagaagcccgcggcggagaagaagccggccgtcgaggaggagaagaaggcggttccggcggagaagaagcctgctgagaagaagcccaagggcggaaagaaggtcccggcctcgaaggagggggcctctgacaagaagaagaagaggtcgaagaagtcggtggagacctacaagatctacatcttcaaggtgttgaagcaggtccaccctgacatcgggatctccagcaaggcaatggggatcatgaacagcttcatcaacgatctctttgagaagatggctcaggagtccgcccgccttgctcgctacaacaagaagaacaccatcacctctcgggagattcagactttcgttcgcctcgtccttcccggcgagctcgccaagcatg

SEQ ID NO: 1809 - DNA, 392 bp, Lilium asiatic
gtgatgtaaaatgaatcagctttaaacgtttgttctgcttctgaaaattcttgattgagagctgaaaattaactgagcttttactctttatcttgttacttaattacggttggttaaggttcattaattactgcctttttatttatgccgattgcacatgattgacgtgtttatcattttttttcctatgatgattgttccaattcttgaggtgtatgtggttttaagcctctgtttttacagagagaacctacttaaagcccacacattcatatgagataactggatcttctgagggattggtttttattgttaactgatatcatgtaatattgattaactatttaaatttggaaaatatgattataggtatttttggctccttattttga

SEQ ID NO: 1810 - DNA, 376 bp, Lilium asiatic
gggacatggcatcagttctccaacaactgttcttaacagcgggttcatctccaccccagagcaatcttcatcacctgaagacatgagcccgagtcctgcagcagctgccgccctttcgatatcgcaagcggccaaccgttttctcaatgggggcagtgctcatgggttgctccgccgcgtgtcagtcaacggtgaatccaatgaggccggcagcgaattgaaacaaagtgctgagcacaacttgccggacagtccttttgcgtctccaacccgagcatttcccgtggttttgggggggttttttggggggccgactcattctcttatcctcagcagcgaagctgaagccacttcagtgtcttccttacagtgacac

SEQ ID NO: 1811 - DNA, 58 bp, Lilium asiatic
catgaatacactattctttatggaaaacaattttgttacaacaccactgtgctcaatt

SEQ ID NO: 1812 - DNA, 340 bp, Lilium asiatic
gcccaatgaggatgttagtgcagtactcccagacaaggagcagtataaccgtgtagacttgcctgaaaaatatacaaatgcaaagttctatatcatcaaatcatacagcgaggatgacgttcataaaagtatcaagtatggtgtttgggcaagtaccccaaatggaaacaagaagttggagggggcatacaatgaagctcaaggaatggcaggcgaatgccctgtctttctgctattctctgtgaataccagtgggcaatttgttggtctggctgaacaaaatttgggggggttttttttttgggcaggtcatttgaaaacttgactatgcagcagacag

SEQ ID NO: 1813 - DNA, 403 bp, Lilium asiatic
aaactaactgagacagctgaggctgctgaagctgctgcatcagcagcccatgcaatggatgacgagagaaggcttgcatgtgcagaaattgagcgtctaatcaaagatggagagaagcaactagagtcatccaggcacaagttgagagaatacgaagaaaaggttatgacacttagcaaagagagagaagtcctgttgaagcagagagactctgcccttcaggaggcacatctatggcgttctgaacttggaaaagctcgagaacatgctgtacatttttttggaaaaaaagggtcccccaaaaaaagggccccgttattagagctgaggaacgggccagagttgcagaggcagatgttggaatctctattaaaggattcggcggatagagcaacagctgctg

SEQ ID NO: 1814 - DNA, 430 bp, Lilium asiatic
caaactttctcgtcgacaagggattgcgaataatatgctctctctggcttgtgatattgcaatttcatcaggtataaagaaactatttgtgcatgtaaatgtggacaacctaccagctcaagatctgtacaggaaaattggcttcgagattgtggaagcagcatcctctgttttggccaaggatcagaggtttctgatgcagttggagttctgacgagatatgagtagtttatgcactttcagtgtaactataccattgtaacctaaccaggcccttgcgtacaagctgtaccagttgtgaggtggcatcccagaagcgggttttcatatgcttgggagtccagtgtacatgatcctctgtcgtgcagatatagtgtatcaaaatgtaaagcttcagtatatgtttttcgacggtgattctactgttatg

SEQ ID NO: 1815 - DNA, 271 bp, Lilium asiatic
acggctgtatcgagactgtgaatcacttctcctgtatactggtttcctcatggtcagaatgcaggcgagctgtatcgtgaacagggacgcatagtaacaatctcccatgacacggtatcattgtatgctgccagagctgtagtcagagcacagtgggatattttgttctttcagattaacacaccagataatttgagatggaatgatgccactggtgtggatggcatgcttgtgagccaattaagggacgcattgagatggaacttttgag

SEQ ID NO: 1816 - DNA, 287 bp, Lilium asiatic
gattcccctctctgttcgatatggcatcagtagaggtcgaatctgctccagtccccgtggaaactgtaccggcgcccgcaccggctacagataaagttgcagcggaggcaccagtagaagaggtggcagcgcctgctgcagaggagccgacagtagaagttaagaaggccgaagaggcttctgatgtggtagagccggaagctacacctgaaccagcagtggagacagttgtggaagagacaccgtaagaagtatcacccgtagcttctggcgcagaaccagaggct

SEQ ID NO: 1817 - DNA, 435 bp, Lilium asiatic
cccacgcgtccgcccacgcgtccgtccacgcgtccgcccacgcgtccgcttggatttcttgccatagtcaactgaaaggcgctcaagcagaagagagccaaggccagagccagtgcctccaccaacagcattgaaaacaaggaacccttggagcccagtgcaattgtctgctagctttctgatgcggtcaaggcaaagatcaacaatctctttgccaatggtgtagtggccacgtgcaaagttgttggcagcatcttctttaccgctgatgagctgctctgggtggaaaagctggcggtaagcaccagttctcacctcatcaatcacagtgggctcaagatcaacaaaaatagcacggtgtacatgcttgccagctccagtttcgctgaagaaggtgttgaatgcattatcacctccaccaatagtcttgtcact

SEQ ID NO: 1818 - DNA, 469 bp, Lilium asiatic
tcccggatcggcgttcccgggtcgaacacacgcgagcgggaactccatcaagcgcggcgtgagttttatcgatcgagaggagttacctcttaggggagaagaaatcccccgcagagttattgcgggagaacaagaggatgctggatagatctattagggatatagagagggagaggcaggggctacagacgcaggagaagaagctgatcgcggagatcaagaagaccgcgaagcaggggcaaatgggagctgtgaaagtaatggccaaagatcttatccggacaagacaccagattaccaaattttatgcacttaagtcacaactacaaggtgtatctcttcgaatccagactctgaaatcgacacaagcaatgggtgaggtcatgaaaggtgttacaaaggcaatgggacaaatgaatcgacagatgaacctgccagcgctgcagaagataatgcaagaatttgagcg

SEQ ID NO: 1819 - DNA, 262 bp, Lilium asiatic
gctgtatcgtgactgtgaatttttctcctgttgactggtttcctcatggacagaatgcaggcgagctgtatcgcgaacagggacgcaaagtaacaatctcccatgacaagttattattgtatgctgccagagctgtagtcagagcacagtgggatattttgttctttcagattaacacaccatataatttgagatggaatgatgccactggggtggtaggcattctttcgaagtctattaaggcactcatttgtgatggaac

SEQ ID NO: 1820 - DNA, 405 bp, Lilium asiatic
gtccggatcatccaagggcttgaaaccctaactcgccgataacatataaaaacaccgccgccgccacagttcgcagccccagagacatcggccgagcggcggcggaggagagaggaggagcaacaatggtgtcgctgaatctgcagaagcggctgtccgcgagcgtgctgaagtgcggcaagggcaaggtctggctcgatcccaatgaggtcagcgagatctccatggccaactctcgccagaatatacgaaagctggtgaaggatggatttatcaatttccaagggggggggaaaaaaaaaaaaaacccagaaaattactcgcgctcacgtgctagacgggctctggggcaaagaggaaaggacgccattcggctatggtagcgcagggtcaagggaagctagg

SEQ ID NO: 1821 - DNA, 144 bp, Lilium asiatic
tccatcttctagagctggaatgttattcagcattcgcttagagaccatgactgatggagagcagactgagatgcaactaaccgacagtatattgaatataagatatggaatctctggtgacagaactgttggagcacatacttc

SEQ ID NO: 1822 - DNA, 387 bp, Lilium asiatic
cccacgcgttcgcggacgcgtggggtttcatagcgggacgggcgtcagcgtcgagggtggggatcatgttttccagacaaacatgctttatatgctgaagcagactggaaggccggagatggttgttgggtggtaccactcacatccaggctttggttgttggcttaccggagttgacataaatacgcagcagagttttgaagctttgaacccaagggctgtcgtagttgttgtagaccccatacagagtgttaaggggaaggttgttatcgatgcctttcgttgtgttaacctttagacttttatgtttggttaagagcctcgttagactaccttctaccttggacgttttaacaaggcatttattttatggattgtttcatgggc

SEQ ID NO: 1823 - DNA, 417 bp, Lilium asiatic
gttgagaatcctcaggatattattgttcaatctgcaagaccatatggtcagagagctgtcttgaagtttgcacactacattggtgctcatcccattgctggcaggcacactcctggaactttcacgaatcaactgcagacctctttcagtgagccccgtcttctcatcctcactgatcccagaactgaccaccagccaatcaaggaggctgcactgggtaacattcccaccattgccttctgtgacactgattccccaatgcgatatgttgatattggaattcctgccaacaacaaagggaagcacagtattggttgccttttttgggtgctggcaagaatggttctgcagatgcgtggtactattcctcttggacacaaatgggatgggatgggtgattttgttttctatagggat

SEQ ID NO: 1824 - DNA, 381 bp, Lilium asiatic
cggacgcgtggggaaaaatgtctacaaatcttttgttagtgattaccccattgtgtccattgaagatccttttgatcaggatgattggacccattatgcgaagatgacagaagaaattggccagcaggtgcagattgttggtgatgatcttcttgtcactaatcccacacgtgtttccaaggcaatcaatgaaaagagctgcaatgcccttcttttgaaggtgaatcagatagggtcagtgaccgagagtattgaagctgtgaaaatgtccaaacgtgccggttggggtgtgatgaccagccaccgcagtggtgaaacggaggataccttcattgctgatcttgccgtcggcttattaacaggccaaattaagactggagc

SEQ ID NO: 1825 - DNA, 403 bp, Lilium asiatic
cggacgcgtgggcacatctcaaggtagctatacagttggctggcaacctccaaagcttggcagatagtgaaggagctagtaatctcaggcatctctttcctctagtcttcatcagagggaacaaagtagagaagtgtatataatgacagtgaagggtaggcaacacaattacaagcagacagtggaggtactcttggttggcagtcagcttcatgggaaaagaggctccaagatatgctcacttgtgcattctctcttggggatagtaggcaattcaaggcaaggtagagaagagatggtgactacatggacagtgacactcacttagtagtcaagacatgagagacaactctaagtccttatatgagggaacaagaagtatcttcaaaggtctattataggg

SEQ ID NO: 1826 - DNA, 182 bp, Lilium asiatic
gttgagaatcctcaggatcttattgttcaatctgcaagaccatatggtcagagagctgtctggaagtttgcacactacattggtgctcatcccattgctggcaggcacactcctggaactttcacgaatcaactgcagacccttttcagtggggcccggcttattatcctcactggacccag

SEQ ID NO: 1827 - DNA, 382 bp, Lilium asiatic
cattgctccaccaaaccatatctgccgagatgataatgattgacgaacacttcaatcctgtgactctccgactccggcatgtacaagctcctaactgacgatgtggtcttctcctccctcaaagccagtgcggccatgggctacctagcgcctgagtacaccacagtcggacggttcactgagaagagagatatctacgccttcggcattcttgtattccagatcctcacaggcaaaggaagcacaagtaacttacgactcggccccgagtctaacgaccttgaaagcctcttcgacgaaaacctgaatggcgacttctctcggttggaagccaccaagctggcagcgatcgcgcttgtttgcacaagcgaggtgcctgatt

SEQ ID NO: 1828 - DNA, 437 bp, Lilium asiatic
  modified_base (356)..(357): a, c, g, t, unknown, or other
ctcggtggtcttgctgtccggagggcttgttatggtgtccttaggttcattatggaaaatggagctaaaggttgtgaggtcatagtcagtgggaagctcagggcccagcgtgctaagtccatgaagtttaaggatggctacatgatttcttctggtcagcctgttaatgaatacattgatgcagctgtaagacatgtattgctgcgacagggtgttcttggcatcaaggtgaagatcatgcttgattgggatcccaagggtaaatctggcccaaaccttaaaaccccccccccccccccccaaaaaattacctgatcttgttaccattcacacccctaaagaggaggaagagtacnnctccgacctgcccttgttgcccctgaaattgaagttgcctagacttgtgctgtaagaatctagattgctatcaaaacctg

SEQ ID NO: 1829 - DNA, 409 bp, Lilium asiatic
  modified_base (276)..(276): a, c, g, t, unknown, or other
gtttgctgagatcctgaccaagatcgacagacgctctggtaaggaaattgagaaggagcccaagtttttgaagaatggtgatgctggattcgtgaagatgattccgaccaagcctatggtggtggagactttctccgagtatcctccgcttgggcgttttgctgttagggacatgcgccagactgttgctgttggggttattaagagtgttgagaagaaggatcccactggtgccaaggtgaccaaggctgctatcaagaagaagtgaggcgttcntttccttcaaatttctttttttaaaaattttttggccgagtttcttaagaactgcaagagtctagttggtaatgcttgtttttgctttgtcgaactttcgtgttgttaggtcagtggctttgatcaaactatt

SEQ ID NO: 1830 - DNA, 427 bp, Lilium asiatic
  modified_base (342)..(342): a, c, g, t, unknown, or other
  modified_base (411)..(411): a, c, g, t, unknown, or other
cccacgcgtccgcccacgcgtccgcggcggatgttcttcatcagctgaagaaccatggatgctctttggttcttatcacttacaatactgtgattgatggattagcaaagagtggtgaaattgagaaagcaatggttctgttcgatgatatgattagtgatggaataagtcctgacgacatcacttatggttcactggtaatgggcttttgcaaaaaggatatggtggaagaagcggtggagatgttgaaggagatggccaagttgaattgcagggggattttttttccccggggaaaagggggggataacttatgcgctagtgatcaggccttatcagaanaaagaagatggatactgctattgctattttgaatatgatgatatcaagtcgcaacagaccccacaatgncatctatgcatcactg

SEQ ID NO: 1831 - DNA, 429 bp, Lilium asiatic
aggtttcctaatacaataggggcattcatctattctatgtatggccatggagaactgtctcaggcattttgtcgatctgctgctgtcaaaggtgctctttatgtccttcgaatgccagtggtagaaattcttctagacaaggaaagggagcagtatatgggtatcagattggcatctgggcaggagctattcagccataagctggtgatggatccgtcgcttatagtttcctcttccgtctctcctccagaaactttcccatcagaaagttcaaatatctccttcctccactctgaccccctcccccctccttttcccgcgaaaaatgagaggatataaaacaaaacatattatagatcgtagagatatatataatattaaaaaacatatttaaaggagagaataaaaaaaatcttattgttaatgatg

SEQ ID NO: 1832 - DNA, 388 bp, Lilium asiatic
gtagtgcccaaggatgtgaacgctgcggtggccacaattaaaaccaaaaggactgtccaatttgttgactggtgccctactggtttcaagtgtggcatcaattaccagccgccgactgtggtccctggaggtgatttggcgagggtgcagcgtgcggtctgcatgatcagcaacaacacagctgtggctgaggtattcttacgaattgaccacaagtttgatctgatgtactccaagcgtgcttttgtgcattggtatgtgggcgagggcatggaagaaggtgagtttttagaggccagagaggatcttgcttgccttgaaaaggactatgaagaagtcggagctgagggtgttgaatatgatggggttgatgcctgtagactactga

SEQ ID NO: 1833 - DNA, 449 bp, Lilium asiatic
gacaaaacaaatacacagatgtatcaagagaagtcatcaatgatgctgagtaaaaatagccataggtaaaagcactggaggtaggttctcgaatatccgaatagataagaccaaaaagggtaagataataaactttgatcggaaatggcaagacaataaactttgatggcttgtaacccctacaagaggacataccaacaaaattcacgagatcgagattaccataacgaaccacaatgccaatgagcgagtgctgttcagctcgcaacatttggagcaaaagaggaggtagattgagaagtggaacgagcatgaacatattggtaatatagacgatacatggtttcctgcctattaacaaatctaaccatcttgctccatttaggatcctgccaacacaagcagatgcattaatagggacggtcatactagaagtacggactattgat

SEQ ID NO: 1834 - DNA, 416 bp, Lilium asiatic
  modified_base (399)..(399): a, c, g, t, unknown, or other
acctgctgaggcttttgaaacagtgggtacatcctcggtaaatttaccaggacctagtaggccaaatagcttaaaagagaatgtcgctgttgtgccagattcccgggtggtggagagttgtgacagaagcctcacaaaacgtctggtgaacatgttgggatcaatatctgcacctcctgcttatgctgcagaaccaacttcttctagcaaatctgtgggacgtatgtctgcaactaattctgcaagctcttccatccacgtcactgctgggatgattcaaaaggaaaattttttttccccggggtttttttgggttttgaagtgatgggcagggccgagcactggtccatgcatagaaatggagacatgggttttctctttcatgcggtgtgcatctangaagtctgatgatgggt

SEQ ID NO: 1835 - DNA, 429 bp, Lilium asiatic
ggctgctgctccggcaaagaaggcaatagtcccaccaccggctaagaaggctgtgcccgcgaagaaggctgctcctgctgccactcctaagaaggccgctcctgcagcgaagaagaaggcggcgactccagcgaaggggaagtccccggcgagaaaggcacctgcaaggaaggcggccaagaagtaggcttttgattcgtgattctgatggcagctggctgtaaattggctgatgtttgagggggcatgtgcgtcgttggcatgccaagtaggtttttccccccttggggtttttttggggggggggcgttttaggtaatttgtgactcctctctcccacccaaactcgtttcttttatatattacgtggttgttttcagtgtcgatctgatcgtttgagacattatgtagctgtaatttgggtactat

SEQ ID NO: 1836 - DNA, 412 bp, Lilium asiatic
  modified_base (289)..(289): a, c, g, t, unknown, or other
ctggcctccagttccccgtcggcaggattgggcggtacctcaagaagggccgctatgctcagcgtgttggctctggagctcctgtctaccttgctgccgtccttgagtaccttgctgccgaggttcttgaattggctggtaatgcagctcgggacaacaagaagaaccggattgtaccacggcatgtgtgcctggcggtgagaaatgatgaggagcttggaaggctgttgggtggtgttactattgctcacggtggagtcctccccagcattaaccccccttgggtttnttttccccttttgggggggtgccaaagaagactggcaaggaagggactgagcccaagtccccaaagaagggccaccaaatcgcccaaaaaggcttaaatgagttatcgagttttctaatgtat

SEQ ID NO: 1837 - DNA, 232 bp, Lilium asiatic
aaaaaaaaaaggagaaaagaaaaaaaaacaatgagagagaaaaagaaaaaaaagggggggaaaaaaaacaaaaagaaggagaaaaaagaaagaaaaggacaaaaaagaaaaaaaaaaaaacgaaaaaaaagaaaggacagaaaagaggaagaaaggggaaaagggagagaaaacagaaaaagaggaagaagaaaaagaaggaaaaaaggaaaaaaaaggagagagaggagag

SEQ ID NO: 1838 - DNA, 68 bp, Lilium asiatic
gccctgtaatcagtctgtgtggaattaatcttttattgtaatatataattaagggtgtagggtatttt

SEQ ID NO: 1839 - DNA, 420 bp, Lilium asiatic
  modified_base (293)..(293): a, c, g, t, unknown, or other
  modified_base (302)..(302): a, c, g, t, unknown, or other
  modified_base (399)..(399): a, c, g, t, unknown, or other
  modified_base (411)..(412): a, c, g, t, unknown, or other
tgattttaaaattcagtacgccagtgttgttcgactttttctactgccaaagtccaatcaacctcatacttttgttgtcgtaacacttgatccaccgattcgtaaaggccaaacattgtatccacatattgtacttcagtttgaaacagaggccatagttgaaagtaccctttctctaagtgaggagatattggcaactaaatacaaggataagctgaacgcaacatacaagggcctaattcatgacgtctttatatcggtcctgcgtggcttgtcccggggtttggggcccnccccaaaanaaaaaaaaattactagacacggaaaatttcgcagttgtcaagatggatatgcttgtgaaatcatcacttgaaagctgaagatgggctcttgtatccncttgagaagggnnttcttctt

SEQ ID NO: 1840 - DNA, 428 bp, Lilium asiatic
caagagtcaactcttataactagcctcattggtggcattcttggacactatgcctgttgcaatggagacacttggtcatcagaagttggaatgctcagcaatggacaacctcgactgatcacaaccttcaagaaagttcccaaaggtacgaatggcggggtcagcaaagaaggcctcctaggagccattgcagctgggtttgttatagggctggcctgtctcctcactggactgtttactgctcaatgtgacagggaagttgcttggaggcaactgctggtactgcctattggttcagcagctgggttgtgtggaagcctcatcgattctctactgggcgcaactctccagttcagtgggtactgcaacttgcgcaagaaggtggtttcgaagcgaggaaagacagtgagaaggatttcaggaatgag

SEQ ID NO: 1841 - DNA, 415 bp, Lilium asiatic
caaattatgattccttctaagttccttttatatagttcctgccctcaaactgatctacaagaatttacttcaaaatttgtgcatacatctaattttgctttagcttctgtgcgaagctacataaaataagttaatttatatttttggttttttgtgttaaaataatgtctctttaattgttaactttttgtcgaagttttgtttacctttgataactaaaaacggacttgacatttttacttttaaaaacttgacatttttacttttaaaaagggacttggctttttttacttttaaaaacggacttggctttttttacttttaattcctaagagtgaggcatgactggatcaaaatttggcttacatatataatagcctttttattttcttttttactttaaattctggagtta

SEQ ID NO: 1842 - DNA, 429 bp, Lilium asiatic
gtccgcggacgcgtggggattgaataaaatggaagcttatgaggtcaattgaagaagaagatgcataagggagagcaccggatgatggcgatgctggatcgactttcagagataaccatgtacattggctttcttggggttatctgctagagttcaagggctaaaatatctttgttcagctctgtaattcaacatcatagatattcatcaactttcaaagcattggaaatgtggtagtattgaagaagaatgggtcaagccaagcacaaggcacaggctgaagactaggagcacaattaaagatgaaggcattgaagcatttatggagaggttctgtggagcaatgtactggcatgagtaatatagtgaaatgatggctcaacaagaatagagcatgttcatgggacagtagcattagttagcaggcat

SEQ ID NO: 1843 - DNA, 392 bp, Lilium asiatic
gaagagatgaagaacatgaccaggcaggagtttgtagctagcttgagaaggaaaagtagtgggttttcgagaggggcttccatgtacagaggggtgacaaggcaccaccaacacggaagatggcaagccagaattggcagggttgcagggaacaaggatttgtaccttgggacattcagcactcaagaagaagcagcggaggcctatgacattgctgcaattaaatttcgcgggctgaatgctgtgaccaacttcgacatctgcaagtatgatgtcaaactcatatgctcgagtactcacctcatcaccggcgatcttgcaaggcgctcccccaaagagaatgccgacacttgagaatcatatccaacctcttgccctaactgatggactcg

SEQ ID NO: 1844 - DNA, 393 bp, Lilium asiatic
acgcggacgcgtgggttgggatttgtggcttgcaactttaccgctatggtgaaacaatttctttaccattctttactgaaacatggagaccggacagtttctaccccaagatagcaagtaatcggaagtttggattgcatactctttgcctgttagatatacgtgtgaaggagccctcgatggagtcattgtgcagaggaaagaagtcttatgaaccaccaaaatacatgacaatacacactgccataaaccagcttttggaggttgaggaaatgcgcggagaatctgcttactatgaagactcaaaatgtgttgtgtttgtttggcttggtaatgaggacctagttgtagtttgtcggttgttgatagattttgcttttttttcttcttttt

SEQ ID NO: 1845 - DNA, 145 bp, Lilium asiatic
aatttttctctttaaaatatttttttatttaattttggactcgtcagctcttgggaacttttggaaggtttactggattctttgatctattagaaagttatgtattttattattttttttataattttctgcttttatttttttt

SEQ ID NO: 1846 - DNA, 423 bp, Lilium asiatic
gcgattgaaaaaggtgatgactgggagcatgaagagactttcactgatgatgatgaaacaaataatattgagcctgatccagaagatatggcccctgaaattcctgctccacctgaaattaagcaggatgacgaggacgaagaagatgatgataatgaagaagaggggggtcttagtaaatctggaaaggagttaaagaagttgcttgtaaaagcagctggactaattgaaactggtggtcccactgctgatgacgacggacaaaatgaaaatgctgctgatgatgacgatgatgatgatgaggagaataatacgtctcctgtgttgtcgcctaaaaagaaagatgcctcaaaggatgaaaatatggaaaatacacctgccaaaacagcatcttctgctcgaggcacaccatctacattcaaa

SEQ ID NO: 1847 - DNA, 420 bp, Lilium asiatic
aagagctacaaaatcaaatggagcaggattacgacatcggatctactatccgagacaagatcatccctcatgctgtttcatggttcactggagaggctgctcaggatgatgaccttgtcgactttgaagggggtgataatcttgaagatattgatgaagaggacgaggacgaagatgatgacgatgaggaggatgatgaagaagaagaggaagacgatgatgaggatgatgaagagggcaccaagcccaagaagggaactacgaaaaagaaaagtggaggtggtcagcaggcagatcgaccagctgagtgcaagcaacagtaacgacttgatcttgtgcggagatggttgatatttcgttggaccccactagattctattgtgaattctagtgttctgtttcttttgtgctggttcgatg

SEQ ID NO: 1848 - DNA, 348 bp, Lilium asiatic
cggacgcgtgggcggacgcgtgggaaaaaaaaaaaaaaaaaaactaaaaaaaaggggggtgggcgtatttggtgaaaaaatttaatattcgtgggtgtgtctagaggtttctattttatagcgacgggcatgctactttaatggtcttttttttttaaaacctaagtgtgtgaaaatgccctggttttatcaattttaatactttgaaaacatatgcgtttttcaacatattgggttagagaaaaatcccgctttccccagcttttttaaaagagaagcggaccccattttgcgagtgtttcaacctttggaaaggcttaatgagcattgggtttgtcgttttttcgc

SEQ ID NO: 1849 - DNA, 361 bp, Lilium asiatic
acgcccacgcgtccgcggacgcgtgggggctggagcagatgacgtactagggaaacagtgacataggagcaatcgtggggttccagaccaagaagcttagaagctcgtgctatacacactacagactgtgtctcggcttacgcatacgggacacgtggtagacaatactgcgcaatgaggagcaaccagattccaagagcagcgaaggaataagggagaaggatatttcggggcgtgggataaccagaagaaacagtgtgcaaaagaagaggagccgaaagacaggaaaagaatggaagggcaagagaggagacagaaacaacaagcacaagaaatagaaagggaaggccaagagacaaaa

SEQ ID NO: 1850 - DNA, 84 bp, Lilium asiatic
acggacaaaactatggggataaagtttgataaaaatttttaaatgaccatgataaaggtaaatgggagggggcatatggttcaa

SEQ ID NO: 1851 - DNA, 271 bp, Lilium asiatic
cccacgcgtccgcggacgcgtgggattattcatttcgaacttccgaatacaagtgagactttggttcatcgatctggtcgaactggccgtgccggaaacaagggaacggcagttctaatgttcaatgaaggtcaacgccgtgatgtcaggtccatcgagcgggatctaagctgcaaatttgaagagctgcgaggacttactggtagtttcgttggcaagacggacatgtcacatgatgaagttagctcttataggggttatggggggccag

SEQ ID NO: 1852 - DNA, 400 bp, Lilium asiatic
aaacagagaggagagagagaaaccctaaccctagaatcggagcggtgatcgccagcgacaaactctagaaatcgatggagtgaagcggccggagatggacgaggttcatgtgagcggcgggggatcgttcgtagcggtgaggaggatctcgcaggggctcgatcggggcggcgcctgccacgcctcgtcagcagaacttgtcacaggatcaactgcgtggctcgggaaaggtctttcttgtgtttgtgctcagagaagagagagtgatgcacgcttatcatttgacttgaccccttctcaggaagaatgcttgcaaaggttacaaaaccgaattgaagttgcttatgatcgctcgaagattgaacatcaggaagctctaagggctctgtggtatgctgca

SEQ ID NO: 1853 - DNA, 423 bp, Lilium asiatic
cccaacctggattttgggacttcagattttgggaaaccaccattggcactgtagtcggctgcattgttttgtatatcattgctattggctggggcaagaaaagtgggctgctgcagtagtggcagtgatattgtagcatatagagcgtgcaaaataagttctcgtcttctatcaaatgtttagtctctctggttactcacgaagagatgagaggttttctcttacagtccagggagatattgaaattgtgtgctaggacccatgaaaaggtaaagttcactggagacgacaggcggatgaagcggagcttcgttgcatttgtttggttattatcagctttctcttggcaaagtttttactgtattggatcattggataaataatacttggttctggaccataccaaacaaaaacttttcggcc

SEQ ID NO: 1854 - DNA, 407 bp, Lilium asiatic
cggacgcgtgggttcgattcgtagctgcggggttgagcagggcggtcggtgtggtatctatggtgcaaattcggccgagtggatcattagtatggaggcttgcaatgctcatgggatttattgcgttcccttgtacgatacacttggtgctggtgcggttgaattcattatatgccatgcagaaattcagattgcctttggcgaagaaaagaaagttgcagagttgttgaagacctttcccagcacaaccaagttattgaaaacaattgtgagctttggccaggtcactccagaacagagggaagaggttggaaagtttggtttagcaatatattcatgggaagagttcttgctcttgtgggattatggacaatttaatttaccagtgaaacaagaaagaagatttt

SEQ ID NO: 1855 - DNA, 399 bp, Lilium asiatic
cggacgcgtgggcgctaccccaaatccccatcgcaatggccggaagaggaaaggcagtcggcgccaccgccgccgcgaagaagtcgtcatcaaggagcagcaaagccggtctccagttccccgtcggcaggatcgcccgctttctcaaaaccggcaagtacgctgagcgcgtcggcgctggcgcccctgtgtaccttgccgccgtcctcgagtaccttgccgccgaggttttggagctggctggaaatgcggctcgggacaacaagaagtctcggatcgtgccgaggcacattcagctggcggtgaggaacgatgaatagctgacgaagctgttgggagccctgtccatttcccacggaggggtgatgccgaacattcacaacagtctttttcccaaga

SEQ ID NO: 1856 - DNA, 422 bp, Lilium asiatic
gaccggcaagggctcggcgacggtgaagacgctggcgatcacaatgtcggtgatcctcctttcaagtattacgagcattctcaagatccagaaccgggggatcaagatggggacggtcacgccgatggatcaggtgctatggaggactcatctgctcgaggcttcactcatcggcttcagtcttttcctcgcattggttattgaccgcttgcactattatctccgtgaattaataacattgaaggaagtggccagctcttcaaaagaagaaattgagaaacttgagaaaaagcatgtacattttaaggaaatggaagcaaaaacttgtagcgagttgagaaaactccaggaggaagtggtttgcctgaccgagaaactgcagaatgtcaagatagagtcttgaaggaaggagaagaaaacac

SEQ ID NO: 1857 - DNA, 421 bp, Lilium asiatic
gtttaaactattggtttaaagcaagaggaaaactttcagacgaccctgctttacatagatgtgtggtggcatatgcttcacatcttatcttctctggtgttagcttaaatcctcataaaaagaagggtttgaagacagcatcacttagcctggatcactccatatggttccacagacccttgaaagctgatgagtggctgttatacacaatagacagcccttccgcctatggtggtcgcggatttgttagtggtcgcatgttcaaccagaaaggggagctccgtgccacattgacccaagaagctctaatcagaaaagcgaaaccagcaggtgatgagaccccctcaagcgaagctgtgagacaatgactatcgtggcttttggatttatcttgtacttcagtgaaagacaatgggctttt

SEQ ID NO: 1858 - DNA, 278 bp, Lilium asiatic
cgacgagaatgtcgcgagggagatcattaatcaccggacgctgctgcatccgaacattattcgggtcaaagaggatgtgctgacatcgtcgccactgccattgttatggcgtgtgcagccgccggagacttcttcatacggcacctaaatcattgaacaggtaggagatgcgtggacaggtttaggtggctttggatcatgagagtgaagaagatatgcttgtattacaagaaagagcgacatcacttgaagctccaactcatataaccatagatgct

SEQ ID NO: 1859 - DNA, 348 bp, Lilium asiatic
tcctgtactccaaggctttacgttcgtgggtatatcctcagtcatctcttccttcttccatcatatctgcaatggctttgacatctacaacaacaggtacagattttttacagagaaggcagcatgactgggaagtttcatttcagaatctttactatacgctcagaaagaacttgtgcggcatattttatgtatatacttcacagtttgtagtgttgtttgttggtggcaacttctcgggaaggaagaagtggtcatgtaatgcttacatttctaaatctactcgtggtctgggaaccttgctgagaaagcatgatgtatcttttaccatgcctttttacctggttg

SEQ ID NO: 1860 - DNA, 431 bp, Lilium asiatic
cccacgcgtccggcttatcaggaagtagattagaggccatggaggaattggatgccgcttcttcagaagatgatggatttctctctgcatttgttaagaaaatgaaacgctggtttttgactcactcacaacatctcaacttcttcacaatattagtacttgcttcggtgccaaacccactatttgatctcgctggtatcatgtgtggacaatttggaataccattttggaaattcttcatggcaaccttgatagggaaggcaatcatcaagacacacatacagacacgttttatcatctctgtatgcaacaaccaacttttagagttggtcgagaatgagctgatctgggctctcagtcacatccctggattctcttcaatgctgccgagcatcatcgccaagttgcaccttgtcaaagacaagtactta

SEQ ID NO: 1861 - DNA, 416 bp, Lilium asiatic
  modified_base (388)..(388): a, c, g, t, unknown, or other
ggaccgcttctttgatttgacacgccgagtatcaccatacactttagagggaatggatatttactcgactcttctttatcatttgaaagaggagatgaagttgagtttccttgctaaagaacttatagcaacagatcgtctatctcctcaagcttggtgtgctatgggtaactgctttagcttgcagaaagatcatgaagccgccttgaaaaatttccagcgtgcagtgcaaattgattctagatatgcttatgctcacactctttgcggccatgaatatgttgcactggaggacttcgataatggtataaagtgctatcaaaatgccatccaagtagatgaaaggcattataacttctggtatgggcctggcgtcgtttaccttcgncaagagaagtctgagtttgcagagcatc

SEQ ID NO: 1862 - DNA, 322 bp, Lilium asiatic
  modified_base (94)..(94): a, c, g, t, unknown, or other
tgagggcgctcgggatggagagggcgttggagattgccgatgagttgaggacggcggcaaagcgggagatcggggaggggtttggggataagtntggggatagggtggtggtttggtgtgtttgggttttttgtgtggggggggttttggtgttgggttttttttttttttttttttttttttttttttttttttttttttttttttttttttttttttttttttttttttttttttttttttttttttttttttttttttttttttttttttttttttttttttttttttttttttttttttttttttttttttttttttt

SEQ ID NO: 1863 - DNA, 432 bp, Lilium asiatic
ggcgagcggcctgaagacggcaccgcccagcgagatcggcccctgtttgagatcctacaagagaataaagacaaaaaagatgcagaattcaacgagagattcaagcatcggccacccaaagctttggatgaagatgagacagaattcttagataattatgagatgtcaaggaaggcttatgagcggcaactggccgatgaagaagctgaacaactacgtagtttccaagaagctgtggcagctcagtcctcggtagtacaggagcttaaggagacacctacggctctgagaatcgaggaaccgaagccggtcgtgaagaggaatcagcctgctcgaccagctaacttcgttatatctgtaaagccttaagcaaaaaaagcgaagatagatacggtaccagatactgggccatctactggtcatgcagttgag

SEQ ID NO: 1864 - DNA, 434 bp, Lilium asiatic
gcctttaaaaaacccggttgggtctaacgtttggatggtcataatgggactggctaactcagtcgccttaaagattgctggtatcaataatgaaacaaaagatccaattggtggaaccatcatgaaatctgcggatggagaaccaactggtctgctagttgacgctgcaatgaaacttattcttgatctgattcctgaagtctcagttcatgagaggagagatgccttgacaagagcaggtaaacatgctctaatgagaggggtgacaacagtagttgactttggaagatattttcccggtgcaccagttggatcatgcttggcaagatctttcagatgtctatcaatgggctgattcatctgcaaaaatgcttataagagtttgcttattctttccaatgcagacatggttggatgcagttaatcttcttgga

SEQ ID NO: 1865 - DNA, 420 bp, Lilium asiatic
ggaaaagaaagcaccctatgaatagagggctaggcaactcaaggatgaatataaccaacacatgagcatccctcttgtcaagtctctaagagagaaggagcaagaaaagcagaatatgaagctggcaaaaaagaagaaaggggcgaagaagctgaagaagccgtgctccgcttacatattgtggtgcaaagataaatggaccgagatcaggaaggataacccggacgcagatttcaaagagatctcggctgccatgggagccaaatggaagaacatgagtgtcgaagacaagcaatcctatgaggagaagtaccgggtggataaggaggcctacaataagatagtggcgcaagagaagcgtgagtgtgatgccatgaagcttttggaggaagaacagatgcagaagactgctatgggact

SEQ ID NO: 1866 - DNA, 309 bp, Lilium asiatic
cggacgcgtgggcggacgcgtggggcgattgtgagtgcttgctatgatgtgctagttgatattcccttcccgcttcagaaggagatgtcggcttttcttgctaatacagagaaacataaggagattgaggtgtgcgatgaggtgatctctgcttcgattaagaagatacatgagcatcggaggaggcgggcgttctttcttgggtttagccagtctccggttgagttcataaatgcgctgatttcatcacagagtaaggatttgaagatggttgctggggaggcaagtcggaatgcggagagggagcgt

SEQ ID NO: 1867 - DNA, 336 bp, Lilium asiatic
gtagcgagcaaggcgggcggactcctgagccatcttctcaaagagatcattgatgaagctgttcatgatccccattgccttgctggagatcccgatgtcagggtggacctgcttcaacaccttgaagatgtagatcttgtaggtctccaccgacttcttccgagaatgaaggttgcaaaggggaagggagcaacgaagaaggagacaaagccagcgctgaagccggtggatgacagaggtgttgggaaacggaaggctgctgctaagccagttaagagtaaagtaaaaaagcctaagaaggaagaaaaggtgaaaaaggatcccaacaaaccaaaa

SEQ ID NO: 1868 - DNA, 286 bp, Lilium asiatic
  modified_base (55)..(55): a, c, g, t, unknown, or other
acgggggacggccatgttttatttttttgcatttatcaaatgctaatacattcantgcctacgagaatacaaagaattagttaaaaacaattttacagcgagaaacaaacttatagatgacaacatgaagtggtataacttcctatgacaataccctcaactcccttttactgactgaagcactcaaactattaacagtgagacaccacaaatgacagttttccttaattaccaaaaagaattttatggtggagcttatttttgttgagattacaagtatttacat

SEQ ID NO: 1869 - DNA, 250 bp, Lilium asiatic
gaaagccggtgggttaagtctttctggaagaaggaagagaacatggccggtgattggaagcatacgtctgggaaatggaatggagatccagaagacaaaggtattcaaaccactgaggactataggttctatgcaatctcggctgagttccctgggttcagcaacaaggataagactcttgtgttccagttctctgttaagcacgaacagaaacttgactgtggtggtggttatattgaagctttttcag

SEQ ID NO: 1870 - DNA, 231 bp, Lilium asiatic
cggacgcgtgggcggacgcgtgggaaaaaaaaaaaaaaaaaaaaaaaaaaaaaaaaaaaaaaaaaaaaaaaaaaaaaaaaaaaaaaaaaaaaaaaaaaaaaaaaaaataagggggcgccctttttagaatacaaaattttacatccgtgtgtatgccacgatatattttttttattgggtcacaaaaaaaaaatacagtgcccgtcttttaaaaacgttggcattgaaaaa

SEQ ID NO: 1871 - DNA, 412 bp, Lilium asiatic
cggacgcgtggggtgaaatcaatcagacgacttgacgtcttcgctactgttggagcaacgtatgcctgcatatgttcactctggatttcctgagtcaagtagcaaatagccttgaaaaagatagtatttaccacttagctgaaaagaaaataccttctgtccacggttacacagttggtttaaagctcgagcagttcatatttgatgcattttcatatgctccttcaacagctatttttgaggttgtgcgggaggaggaatttgctccggtaaaaaatgctaatgggatcgagttatgacactccggatagtgctcgactgatgcttctccgccttcacagccggtgggtagtcgctgcaggtggctttttaacgcattcggtgccattgtatttgaccgggggggagatct

SEQ ID NO: 1872 - DNA, 359 bp, Lilium asiatic
tcaaaagcagagcataagtgagaagaagagtcggaaggcaatgttgaaacttggaatgaaacccatactcggtgtcagccgtgtcacagtaaagaagagcaaaaatatactgtgtgtcatttcgaaaccggatgttttcaagagcccgaattcagacacatatgttgtctttggtgaggctaagatagaagatctgagctctcagctgcagacgcaggctgcggagcagttcaagggccctgatctgagtcatgtgatctcgaagcctgatgcttcggcctcagcacaggatgatgaagatgttgatgaggcttgggttgagcctaaagatattgagctggtggtgacccaagctggag

SEQ ID NO: 1873 - DNA, 426 bp, Lilium asiatic
gtggcattggaggggtggctactgctttggcatataaggatatcctgggaacctaatagagggagactcgggcaattttcgaagcccttttctgttggggattatataaaggctggaacagcagaagggcatgtagcggacatgggactaactacgacaaccttattaagccctgatcttgttattgttccaaattctctattttccagtcaggtaattgtgaatagatcacgtgcccgttggcgttccagtgtgaccaaaattcctgtacgcatcgatgatatacacaagattcccctcgcttctgaaaagattaagcagatgctacgagcaaatgcaaatgtgttcttagagaaggatgctccatattgttttacttctcgaattgataattcatgtgcagagattactctcggatgcaaccta

SEQ ID NO: 1874 - DNA, 218 bp, Lilium asiatic
cccacgcgttcgtccacgcgttcgcacaggtaagaccattaccctggaggtggagagctccgatacaattgataatgtgaaagctaagatccaggataaggaggggatccctcctgaccagcagaggcttatctttgctgggaagcagctggaggatgggcgcacacttgctgattacaatattcagaaagagtcgaccctgcacctagtccttcgtc

SEQ ID NO: 1875 - DNA, 309 bp, Lilium asiatic
atcagtctccgctgaagagtttttcccacagtggaaatcgttatccggaccacctctgaagcttcaagaagtggttagaggcgtaaaaccaatgtctctaccagaaatggtaaatatgtttaccagtcttcacttggccgtaacagcaggacttgatacaaacccaaacaatctggttgccagtactacgtttttctccgagagcactcgtgcaatgctttgtttgataagagttgaaacggatccgtcagacaggacgcaactgaggttaaccattgcttctggggatcctgcattgacttttgagtt

SEQ ID NO: 1876 - DNA, 414 bp, Lilium asiatic
gcccctgaaattgaagttgcctagacttgcgctgtaaaattctagattgctatcaaaacctgacctgacaagatctcttctcatgttatggtttttggtaggagtttagggtgtcttttgtttttttaatgactttgaaggttatgtattgtgccacctgatagactcctgtttctgttatttttgaggaattatgaaagcttctgtttgtcaaaaataaaaatattaataattataatataaaaaaattattttaataatattatatttttttaatattattttggttggggggggtggttttaagccgcctgaggagttttggtttggggggggagtcggttttcaggcttcgggttttggtcagggtgaggaggatgcttgttagtttccataaaccttgcttcttttttc

SEQ ID NO: 1877 - DNA, 156 bp, Lilium asiatic
  modified_base (16)..(16): a, c, g, t, unknown, or other
  modified_base (75)..(75): a, c, g, t, unknown, or other
aaggactcattacttnggccggacaatcctccatgggggtgcaaagtatagagccaccggtaggggccttgttgntccttatattaacatctcagagaactacaagctttactcccgaaatccttttctgaagcgattggaagaaagcctcttatt

SEQ ID NO: 1878 - DNA, 222 bp, Lilium asiatic
gcgcgctgactctgtgaacaggaacaatgggcgcaatttggaaaataatggtcactcggggaacaggaccaatggacagacttctgaaagcgatgattactctggagatgctagttcgtaccaggaacagccgcaacagccacaacatcacaacagtggatactattagtggcatgtttgttttctggtggtgtgcaggtttggggcgtacatgccgaatga

SEQ ID NO: 1879 - DNA, 375 bp, Lilium asiatic
caaagaaacaattcttattggccactctctggagaatgaccttttagcattgaaaatatctcatgatttggtgatagatactgctattttgtatgcatttcgtggtgtacgttacaagacagctctgcgcgttttatctaagagattcctttctcgagagatccaagtttcaggaactgggcatgacagtattgaagatgcaagagctgcattggcacttgcattattgaagtttaaacatggtccagattttggttcagctcctttatttgtaagaacaaaattggtttcacttttgcatggaagtgacaaaatatgctctctttgtgatgattcatccattgcgaaaagatattctgatggttcgtgcaatac

SEQ ID NO: 1880 - DNA, 429 bp, Lilium asiatic
attgttgttcattatgtcgaggcatccaagagaccagttcgcccggacacatacatggattataaaggaaataaccataagctgcatgagtggggaatgcaactggaggagtatattggtcttattcaagattttttcctccttcctcaaattatcagcaacttcttatggcaaatcgattgcagacctctcaagaaagcatactatgttggaatcactgtggtacgacttcttccacatatatacgactatgtaaaggctccggtttttaatccctacttctccgaagaattcgagtttgtcaacccaagcttagatttctattcaagatttggagatgttgcaattccagtgactgccactgtgttggcggctatcatatatattcaacaaaggtggagttaccagaagcttatccagactttgaga

SEQ ID NO: 1881 - DNA, 318 bp, Lilium asiatic
cggacgcgtgggcgctcccgcaaagaaggctgctgctccggcaaagaaggcaatagtcccaccaccggctaagaaggctgtgcccgcgaagaaggctgctcctgctgccactcctaagaaggccgctcctgcagcgaagaagaaggcggcgactccagcgaaggggaagtccccggcgagaaaggcacctgcaaggaaggcggccaagaaagaagcttttgattcgtgattctgatggcagctggctgtaaattggctgatgtttgagggggcatgtgcgtccgtggcatgccaagtaggttttcctcgtgggttttt

SEQ ID NO: 1882 - DNA, 243 bp, Lilium asiatic
cgaggcgtattctgtaggactgttcgaggatacgaacctgtgcgctattcatgccaagcgcgtcacaatcatgccgaaggatattcagctcgcacgtcgcattcgtggcgagcgcgcttagaagatctgctgatcttgttggtgttagcttttttcagtttttatccttgtcttgttctggatttagttcttgctatgggcatttggtgttaaagtcttgatatggaacagattggtttgctt

SEQ ID NO: 1883 - DNA, 413 bp, Lilium asiatic
caacgtccctggagggtggacgactatgatatgttcaagaaaagaatgctgggtcgtgaagacaagacactccaaccgcataaaagagcgttgctttttgttgataatgcaggagcagatattgttcttggaatgcttccactagctcgggagctcctccgacgtggaactgaggttgttttggttgcaaattcattgcccgctttaaacgatgttactattaatgaacttcctgaaattatagcagaggctgcaaagcactgtgatattctccgaaaagccgccgaatcaggagggctgcttgtggatgcaatggttaatatcgaagatggttatagagaatcatcatctccagttcccctaatggctggtgaaaatggttgtgggggtccatgcattgacttccgttaggt

SEQ ID NO: 1884 - DNA, 433 bp, Lilium asiatic
  modified_base (409)..(409): a, c, g, t, unknown, or other
gaatcgacatcgttaatgatgatctgctcctgcgatccaaatccttgaaccgatgagctcccgcaattgactcattgatttcctccggcaaatcttgatctcctcgccaaaccctagctgatggccctgagatttctctcttcagtctctcttaatgcggtagattgccaaaaatatcaagaagcacacaaagggctcaagaaccaactatttttatcccgaaggaaccgcatgggttgaatcagcagaaaattggaccgaaccaagtctcttggaccaaataggccatatgtggactcatctagaggggtgcacacgcacgtgagtgccacatatcccggattctgaaatcggggacataatcagcccgaatgcacacacagcctcctggcatgcatgtgcacgcatncgagagcagtgcacgcacataaat

SEQ ID NO: 1885 - DNA, 169 bp, Lilium asiatic
aaaaccgggcggaccacgcgtccggccacacgcaagtgcgaggtccacctttggcttgttgtccttttactccgcggaacaccaaggttgatcctggacagaggtgggaggcagccaccatgtaccgcgacagagtcatctacctattactaggcatcgacgatggtac

SEQ ID NO: 1886 - DNA, 314 bp, Lilium asiatic
gccggcggctgtgggcgcagttcaaggaaaagggcgaggtcggagccgcgggggccgtggcggcgagtgtctcggcggtgccgagatcggcgtcgtggattcagctgcagctgctgctggaaggggatggtttcaggagtgagatttttgaatctgagaaggacattgtatccgagaaagatctggaacatctattgcatcttttagatggcaaggatggagattcaaccttgcaacatatgatggagcgctccacaccaaatatgatctaccaggcatgccgacatgaaccataggtggggcctgtaatttat

SEQ ID NO: 1887 - DNA, 266 bp, Lilium asiatic
agctcgccgtggagatcattgtggggacatttttaggcgtatatatgcgcggacctaggcgcgtaacttgtaacgtgacatgaacacttgtcatcacccttaatactaggctgaattctacgtggaggtgcttttcaaggtgctctataagagagagccacaacaactttctcaggcacttgaggtggaaagttaggaagaaagctgggagacaaacctatatgctaagccactttcatagatgtaagcaggcatctatgattgta

SEQ ID NO: 1888 - DNA, 356 bp, Lilium asiatic
gaacgatccctttgtgatactttgaggcatttcaatggagcgatacgaggtgctgaagagcgatctggttcggcgaacttcggagtggccaacttggtcagagatgtggtgaccatggagctgcttgccgtgaagttcatcgagagaggacagacaatcgatgagagcgttcagagggcgatcatgaatcacaggtcgctgaggcatccgtatattgagaaaattgaggcggtgtttctcacacccacacatgtagcgataataatggaatatgccgctggctgtgagctctttgagagaatatgccatgcgggaagattcagtgtggatgaggcacggtttttctttcatcaact

SEQ ID NO: 1889 - DNA, 242 bp, Lilium asiatic
cgtgagatcaatagcatgcgtaatagagccacattgtgttaagtgaatgagttcaccattagcaatgcggatcttaggaaactttgtattatgggattgcttgtcagtaactaataatatgacatgaacattcatatgtaaagatccatggacgagatgtattaattattagtgtaggcggggcaaaacctgagacaaaacctgaagaaacactattacaatgttcctctaaacggcagcat

SEQ ID NO: 1890 - DNA, 365 bp, Lilium asiatic
cggacgcgtgggcggacgcgtgggttgaagacgagataagcccggagctgaagcatactggagcggggattatatctatggctaatgctggtcctaacacgaatgggagtcaattcttcatcacgctggcgccgactccgtcgttggatagaaaacacacaatttttggaagagtttgcagtggcatggaaatcatcaaaaggcttggaagtgtgcaaactgataacaatgataggccgatccatgatgtgagaatattgcggaccatagttaaagactaacatgttggagacacagtaatgccccgatacaaacaattttcggacatattcttatgttgcagcctcgtaactcattatccgatt

SEQ ID NO: 1891 - DNA, 332 bp, Lilium asiatic
gtccgggacttaaaccattaactttatctactccagagcgcagaataaccccatcgacaccagtggggtgttgctcgttgccctcggtctcctggctctcgctgcgagcgccaccttcacgcatacaagcggcggctgcggctgccagccaccgtcgccggttcatctaccgccgccggtgcatctgccaccttcggttcacctgccaccttcggtgcatcttccaccgtcggtccacctggcggcgtcggtccacctgccaccgacggtccatgtgccgccgccggttcatttgccgtctgcaccatgccactaccctacttaaccggccc

SEQ ID NO: 1892 - DNA, 405 bp, Lilium asiatic
cccgtggactctacagaaaaccagactgtaaccaagcccgtgaggtctatgggagaccgtagacaatatgttaagacaacatatgtggtagctgaggaggcgccatatagacaacctcaaagagatgtccgcgaagaaataaaatcttcacatccatatgaactagtgttcactaggaaaaaactagaaccgcacaagttctgacagtagacatctgtgctacatgtgcgaatgtcttatagttaatcccatactgctgagtgaattttcaggaaacaagtcacatcttacaacactgatatatacgacttgtacttgttttatttatccaacggttttcaactagagtaacacctagcatcttgtacataccgtgctagacaagactcttggtatgatcgtgac

SEQ ID NO: 1893 - DNA, 195 bp, Lilium asiatic
cattatcttatctactccagagcgcagaagaaccccatcgacaccattagtgggtttgatagatgcccttggtctcctgattcttgctgcgagcgccaccttcacgcatacaagcggtgggtgtggctgtcagccaccgtcgccggttcatttaccggcgtcggtgcatctgccaccttcggttcacccgccacc

SEQ ID NO: 1894 - DNA, 240 bp, Lilium asiatic
cgtgagatcaatagcatgcgtaatagagccacattgtgtaaagcgaatgagttcaccattagcaatgcggatcttaggaaactttgtattatggtattgcttggcagggactaataatatgacatgaacattcatagacaaagatccatggacgagatgtatcaattattagagtacgcggagcaaagcctgagacaaaacctgaagaaacactagtacaatgtgcctctgaacggcagg

SEQ ID NO: 1895 - DNA, 317 bp, Lilium asiatic
atttgagccatgtgggcttattcaacttgaaggcatgcaatatgggatgccggtcatttgttcgaccacaggtggtcttgtagacacagtcaaggaaggattcactggattccacatgggcgccttcactgttaattgtgaagctattgatccagtggatgtggtggcgactgttaaaactgtgaagaaggctcttaaggtctatggaactcctgctttcagcgaaatggttcagaattgcatggctcaagacctttcatggaagggacctgcgaagaagtgggaagaattgctcctcgatctaggagtgcatggca

SEQ ID NO: 1896 - DNA, 117 bp, Lilium asiatic
actaaaaccatttggactcataaaacaggctcgttttttttattgaatgccggcaacatgggcaatggggggtgttcttgggtacacatgaaactaaaacttaattggttctcatat

SEQ ID NO: 1897 - DNA, 350 bp, Lilium asiatic
acgacccacgcgtccgacgcgagccatgtgggctcattcaacttggatgcatgctttatgggacgccggccatttgggcgaccgcagatggtcttggggacacagtcaacgaacgattcactgaattccacatggacgccttcactgttaattgcgaagctattgatccagcagatgtggtggcgactggtaaaactgtgaataaggctcttaaagtctatggaactcctgctttcagcgaaatgtgtcagaattgcatggctcaagacctttcatggaagggacctgcaagaaaacaggaagaattgctcctcgatctaggagtccatggcagcgaaccatggattgac

SEQ ID NO: 1898 - DNA, 414 bp, Lilium asiatic
gctatttctatgaagcatttgaagcttttaacgccctcgaggatccccgtgcagtcttcagccttaagtacatgctcctttgcaagattatggtgagtcaggccgatgatgtgtctggaataatttcttcaaaggcagggttgcagtacttgggaccggagctggatgccatgaaagccgttgccgatgctcactctaaaaggtcactcaaattttttgagacagctcttcgtgacttcagggctcaactggaggatgaccctattgtgcataggcacctctcgtctctgtacgacagcctactagagcagaacttatgcaggttgatcgagccgtactctagggtggagaccgctcatgtcgctgagctcatagagctgcctgtcgaccacgtggagaagaagctgtcccagt

SEQ ID NO: 1899 - DNA, 425 bp, Lilium asiatic
cttctgcaatcatggtggtcgctttgggtcctggcaagttctacggcagcgccctgccgcgtccccgcttctacaccgatgtaaagctcaactcggagcggatcgacccgccatcgtcggtgatggccctgctcctcgcctgggccgaggatgcccactggtccatgggcggtctgagtttccagcgcacccgcctccagggtcgcatcgagggctcggtcaagaggctccgcgcccagcaagaagaccgcgcccggaagttccccgcaccgatgaagcccaagaaggtccctgtagctgttgagaagtccccttctcctccctctccggtagttactgtggaaggagatgggaaggacgatgttgtggtgaaagagtcgaccttggctgagctgttccgtgggaggaagaggatgagtgctggt

SEQ ID NO: 1900 - DNA, 410 bp, Lilium asiatic
aacacacctggtaattttcctgcaggttagatcttcacttcaagttctgagggtacaacgggaaacagacaaggtcatgctgaagcgacagagatcggcttttcccccgaactttgttcactccctcgacgggtcacatatgatgatgactgcagttgcctgtaaaagggcaggattcagttttgcaggagtccacgattcgtactggacacatgcttgtaatgttgaggagatgaacactatactccgagaaaagtttgtggagctatacgaaagaccgatcctagaaaatctactggagagttttgagcaattgttcccaacattaagtttccctccgttgccagatcggggagatttcaacctggaggatgttcttgattctccgtacttcttcaactgatctggga

SEQ ID NO: 1901 - DNA, 400 bp, Lilium asiatic
cccgatctcccaggccggcggcgcccgatctccaaacttagcggcgccctggcttggatcccgacgggggcacccttcctcgcgtaccgacatcctacctcgcgtcccgacgacggcgtctccctcacgtgccggcggtctccctcgcgtcccgacggcgacgttcttcctcgtgtgccgacggcggcgccctccctcacgtcccaacggcggtgccctgcctcacgtaccgacggcagcgccctcccgcgaccccaaacaggaggaccctgcctccaacgtagatgatgctctccattggcaacctggtggcagtagctgcttgtccctcacaaaagcaaaaacaagagagtggtggccaagacgataagatggaggggaccaagagaagaaaaggagg

SEQ ID NO: 1902 - DNA, 385 bp, Lilium asiatic
cgctcaaccattattattattgttattattattattattattattattactgaggtgatgcgatgaagaaagataatcacgtcttgatcttcggatctcgattctggatccggagaggtgagatcctttattgtgttcgtattctctgagcatcatgtcttccaatttcttttgttaagtttcattgaattcgattgatcgcttctatgtgtacgtgtttaatttgattttagatctgaactccatttgttgttgggatgatgaaccattttatgtcttcgatctcggatttagatctggagagggtgagtgagataactttggtgaatttttgagcattctacgttccctaatgttttccttccttaatttttttatttaaatt

SEQ ID NO: 1903 - DNA, 330 bp, Lilium asiatic
ctgagtcttccgaccattagctttatctacttcagagcgcacaacaaccccatcgacaccagtggggtgttgctcgctgccctcgctctcctggctctcgctgcgagcgccacctacacgcatacaagcggcggctgcggctgccagccaccgacgccggttcatctaccgccgccggtgcatctgccacctccggttcacctgccacctccggtgcatattccaccgccggtccacctgccgccgacggtccacctgccaccgtcggtccatgtgccggcgccggttcatttgccagcgccaccatgccactaccctactcaaccgtcc

SEQ ID NO: 1904 - DNA, 393 bp, Lilium asiatic
  modified_base (345)..(345): a, c, g, t, unknown, or other
cagattctcacccggttcggtcgccggcggaggaggaggagagagatggaggagtcggcgtacctgcatcagtttgtggaggagaccgactggtacaacgggatcgtgctgggatctttgatgccgggcgggatgtggcggtcgctgccccgcccggtgcagtcgtggctgcgtaactacatcggcggcaccatcctctacctcctctcagggtttctctggtgcttctacatctactactggaagcgcaacgtctacgtccccaaagatgctattcctttaaagaatgccatgatgttgcaaataggtgttgcaatgaaggctatgccttggtactgcgctctntcatcgctttcagaatacatgattgaaaatggatggacaagatgttac

SEQ ID NO: 1905 - DNA, 410 bp, Lilium asiatic
gtcagttttgattgaatccactggtgttattggtcacttaattaagaaggatgctctttgcaaatcacttcctgtactttttagttccctgtcgtcgactaccgagggtgctgattctgcagctatagctattacaactactgaccttgtgagcaagagtgtggcagttgagactgaggtaggtggagcaccaataagaattggtggaatggcaaaaggttcgggaatgattcacccaaacatggcaacaatgctcggtgtggtaaccactgatgcactgatttcaagtacagtttggagagagatggtgagaatatcagtaaatcgaagttttaaccaaattacagtagatggagatacaagtaccaatgacactgttattgctttgtctagtggagcatctggatcga

SEQ ID NO: 1906 - DNA, 366 bp, Lilium asiatic
cggacgcgtgggcggacgcgtgggctcatggatgagttcgtatgcccgatatctaaagtggtctatcctgatgtcggtggatcatcacttgattcacatcatggttttgtcgttgagtatggaaaagataaggatgttgacttagggtttcatgtagatgattcagaggttactttgaatgtctgtttgggcaaacaattttctggtggtgaattgttctttcgaggtattcgatgcgacaaacatgtaaactcagaggctcaacccgaggaagtttttgactatgctcatgtccctggtcaagctgtgcttcatcgtggtcgccatcgacatggtgctcgtgctacaacctcaggacacaggatt

SEQ ID NO: 1907 - DNA, 159 bp, Lilium asiatic
cggacgcgtcggctcgcatgaaatagacaatgatcaaaacagaaccttcaaggaaacaggggcacagtaccgggggggggggaaacctctactacagagggcgctgacacttgcagaacaaggcatgacaaacactgacccagggagcatgagcagaaa

SEQ ID NO: 1908 - DNA, 376 bp, Lilium asiatic
ccgacgcttccgaccattatctttatctactccagagcgcagtagaacccgatcgacaccagtggggtgttgctcgttgccctcgctctcctggctctcgctgcgagcgccacctacacgcatacaagcggcggctgcggctgccagccaccgccgccggttcatctaccgccgccggtgcatctgccaccttcggttcacctgccacctccggtgcatctcccaccgccggtccaactgccgccgccggtccacctgccaccgccggtccatgtgccgccgtcggttcatcttgccgcgccaccatgccactaccctacttaaccgccccggcctcaggctcattcccagccacacccatgcccgtgccaacagt

SEQ ID NO: 1909 - DNA, 115 bp, Lilium asiatic
cggacgcgtgggggttagtacgtggagctaacgcaagtgtgtgtacgtgtttggcacggctccggctacttttaaattgactccggctccaacatttttacaggaggaatttttt

SEQ ID NO: 1910 - DNA, 251 bp, Lilium asiatic
aaccatttttggtcaacactttctaccatttgatggtactaagaatgctgacaccatatgaggcacagtagtctataatggctctctgaacaaaattacaaaaaatgtcgtcacacctatgagacctggtcgcatggaaatctacccgctatcgctatttgatgagaaccagaaaagtttcctgcctggacgctatgagcgtctctgtggactattcacatataatggaaaaccaaagttcactattcatc

SEQ ID NO: 1911 - DNA, 180 bp, Lilium asiatic
aaccgggccgcgaataccgcgtccacccactcatcctatttaaactatctccctatcttctagaagacttacccaacacatcctctagcgtgttttaaaaacgcccatagactccttcatccttttgctcacatccttaccatccatttaatacgtattcttggcttagaaacctacaat

SEQ ID NO: 1912 - DNA, 117 bp, Lilium asiatic
cggacgcgtgggggttagtacgtggagcttttgcaagcttgtgtacgtgtttggcacgggggcggctgcgttttaaattgacgtccggctccaacatttttacaggaggaatttttt

SEQ ID NO: 1913 - DNA, 115 bp, Lilium asiatic
cggacgcgtgggggtaagtacgtggagctattgcaagttgatttcgagtatggcacgggtgcggctgcgttttttattgagtccggcggcaacatttttacaggaggaatctttt

SEQ ID NO: 1914 - DNA, 146 bp, Lilium asiatic
aatttttatacctctaattacacaccaaatttatatttttattgcttgggacgagcaaaggtcaagtgtagatgggtgtaatacaccgcgatctgcattaataaaacaaataaaccctcattcatacgaaatgactatggaaaaca

SEQ ID NO: 1915 - DNA, 418 bp, Lilium asiatic
gtttctcagctatgtcacaaaaaaggtgcattggtttgcattgacggtacctttgcctcacccatcaatcagaaggctttaactttgggggctgatattgttctgcattccgcaaccaagttcattgctggtcataatgatgttcttggaggttgccttagtggttccgtagagttgatatccaagatccgccagtaccatcacgtcattggtggtgtcataaatcctaatgctgcgtatatgattatccgaggtatgaagacacttcatcttcgtgtacaacatcagaatactactgcattgaggatggcccagtttttggaggatcatcccaagattataagagtctattacccaggcctgccaagtcatccagaacaccacattgccaaaaggcaaatgactggttttggtgggg

SEQ ID NO: 1916 - DNA, 354 bp, Lilium asiatic
cggacgcgtgggtgcacacattatcaagacatcaatgagaaccacccaccggtctcatcgggcccgctcagctcactgcccgcaaccaccaccagcagcaagaagaagaaggcatggaggaggtacagagttcctttgcggacatcaccaacctcctctaccccgatactgccggagttgcttccgagacttcctctgtgccccacgagactatgttccatctcccctcaacttccaacgaggccctgccgctctacaccgccattcgggctggatcctctcggaagagaaaaagccatggtgttgatgttggtgccgggcagcggtgtctccgcgtgaaattccggtgatagc

SEQ ID NO: 1917 - DNA, 418 bp, Lilium asiatic
  modified_base (360)..(360): a, c, g, t, unknown, or other
agaaatcactctcaaaataggaacagtaaaaatccccatattcgccgtcacacagagagcggacgatctcgaaaccctagaccgatctccggttcttgccgcgcctggcctgcaggtgatgtcgaccccggcgaggaagaggttgatgagggattttaagcggctgcagaatgatcctcctgccgggatcagcggagccccgcatgacagcaacatcatgttgtggaacgcggttatcttcgggcctgatgataccccttgggatggaggtacgtttaaattgacactccagttcatcgaggattatccgaataagccgccgactgtgcgctttgtttctcgaatgttccatccaaacanttatgcagatggaagcatttgtttggatatactacagaatcagtggagccctatctat

SEQ ID NO: 1918 - DNA, 236 bp, Lilium asiatic
gacgagtaaaggaaaagtgacagagatggtgtctagattgaaatcacgacgtgactcggagagcatggtcaggatgttgacagagaatgaagagcttgtactgttattggagaaacatcaaccagcttacattggggctagatccatttactcacataatcatgccacagttacttcaatgggcttactatacctaggcgcccaagaacatcatgcacacatagcaagtgaatgta

SEQ ID NO: 1919 - DNA, 266 bp, Lilium asiatic
ggcggcacaaagacaccttgtgcgattctcgtctggactcgccgccggatcgtcagtctccgccaccctcgctggagacggcgctcacaagtctgaacacaaaatttacacatgggaggtgtgcaagattgtaactcggttatgcaaaacccgcaagatgtgatctcccatatggaaggaaagtcctacagcgcaaaatgtgacagctcgtcacacgtagagaaattaagggagtcgctttaccaccgaatgctgattgcgatcaa

SEQ ID NO: 1920 - DNA, 276 bp, Lilium asiatic
gtggaagcgaggtccggaaattgaagaagcccaggagaacacatcgacgagcttgtgtcacaattgcgcatcgactgtttcatcgtgtggctcgctttttgactatctttctgcgacgaatcctggctgtggtaacctacaatctgctcgctgccccaatcttgagtgtgcgtctatgcatggcaggtttcaagagataacataccaagccgaggaatccaagcagtgtgtgacagaaggtgcacccacagtctctgctagccaggttgataccat

SEQ ID NO: 1921 - DNA, 284 bp, Lilium asiatic
cggacgcgtggggcaaaatctcaccctcccatcctccgattatgtctcgtgtgtacgtgggcaacctggatccccgagtcaccgagcggcatctcgaggacgagtttcgtgtatacggagtctttcgcaatgtgtgggttgccagacgacctccaggctatgcttttatcgacttcaatgacaagagggatgctgaggatgcgattcggggtcttgatggcaaaaatgcgtggagagttgagatttctcataacaacaagaatggtggtggaggtcgtggcggt

SEQ ID NO: 1922 - DNA, 418 bp, Lilium asiatic
cggacgcgtgggcggacgcgtgggtgctcattgtatatgtatttctgtatggccgcctctatcttgttctcagtgggctcgaggaaggcttggcagctggtagaagatttattcacaaccaaccccttcaagttgctcttgcttcccagtctttcgtgcagcttggatttcttatggctctacctatgatgatggaaattggccttgaaaaaggattccgcactgcactaagtgaatttattctgatgcaattacaactagcttctgtattcttcacattttctcttggtacgaagacccactactacgggagaacattgcttcatggtggtgctgagtataggggtacaggtcgtgggtttgtggtctttcatgccaagtttgctgagaattaccgactttactctcgtagtcattt

SEQ ID NO: 1923 - DNA, 425 bp, Lilium asiatic
acaagatatgctcaccaaagcgtctcccgaacaggcaatgaaggatacgagtacggtttcagccaagattatgagcaaagcagaaatgcaggatatcagcaaaaccgaaatacagaaggatgcgagcacagcagaaattcaggatatgcacacagaagtggttctagggctgatttcaaccaagggtatgagcaaagcagaaatccaggatatgcgcacagaagtggtcctaaggctggttttaaaccaaggttatgagcaaagcagaaatccaggatatgcacacagaagtggtcctaaggctggtttcaatttcaaccaaggttatgagcaaagcagaaatccaggatatgcgcacagaagtggtcctagggctggtttcaaccaaggttatgagcaaagcagaaatccaagatacgaggaag

SEQ ID NO: 1924 - DNA, 384 bp, Lilium asiatic
acaaattcatgctttacttactgactgcggtgaagaaagcgttggcatatggtggagtcacggatgaggtgatgagtgaattagacaagactagatgtggagttcttattggctcggcaatgggaggaatgaaggttttcaatgatgcaattgaggctttgagggtctcgtacaagaagatgaatcccttttgtgtaccatttgcgacaacaaatatgggttctgcaatgctcgcaatgcatctgggctggatggggccaaactattcgatctcaactgcttgtgctacgagcaacttctgtattctgaatgcagcgaaccccattatacgaggtgaagctgatgtgatgctctgtggtggctctgatgcagctattataccta

SEQ ID NO: 1925 - DNA, 323 bp, Lilium asiatic
ccctccccctaagtttcaaagaactccgattcccacatccgctcacattctccgatcaccgccgccggcgacgacaatgacggcgccggcgaggatcactggaactctagctctgttcgacgtcgacggcactctcacggcgccgagaaagttgataactccagtgatgcttgagttcatgcggaggttgcggcaggttgttactgtggggatagttggagggtcggatctgatccacaatctcgagcccatcgggagttctggcattaatgactatgactatgtattctctgagaatggtcctgggggctaccaaaaagggg

SEQ ID NO: 1926 - DNA, 242 bp, Lilium asiatic
agtcggcgtcggcggcgtctacccctccggcggtccctccggcagccaaggagccccatcggggccgttatcctcggaggccctctccctcctgttggaagggatcagccatcgcttctcccgttggactgtgctgtagctggccgtagaggatcagaccggcgggcgggattcccgccggaagtctgaagagtttgtcttcaccgtccttttctggttcttccataccaaagagctttata

SEQ ID NO: 1927 - DNA, 421 bp, Lilium asiatic
  modified_base (280)..(280): a, c, g, t, unknown, or other
  modified_base (383)..(383): a, c, g, t, unknown, or other
gaagaaatattctgaattcattaacttccccatatacctctggtcaaccaaagaggtggatgtggaattgccagctgatgaagaggaatcatccgaagaagaagaatcatctgattccaccgaatcggaagatgaagaaaccgaggaggaagaaactgagaaaaaacccaagacaaaaacagtgaaggaaacaacttctgagtgggaacttttgaatgatgtgaaggctatttggcttcgcagtcctaaagagatctctgatgaagaatacacaaaattntaccacacaattgctaaggattttagtgatgagaagccactggcttggagtcattttgttgccgagggtgatgttgagttcaaggccctactggttatacctncaaaaggctcccatgatctctatgaaagctactacaac

SEQ ID NO: 1928 - DNA, 323 bp, Lilium asiatic
gccaaaggctgcttttgaattgctcaagtggaggattctgcccaggccacgtctggaaactgctgtctctatcatccttttgtcagtaaatgatcctaattggcggaccagatctgcaactcttgcatatcttcgcacttttatgtacaggcacacatacatcttatctggttcagagaaattacacatctggaagagtattgagcagctacttgtggacaatcaagtcgaggtacgggaacatgctgctggggttcttgcaggtttaatgaaaggtgaagacgaagaactatctatggattttcgtgatcgggcattttctg

SEQ ID NO: 1929 - DNA, 159 bp, Lilium asiatic
tccacacatacgaccacacgttcgcatactcatttatcaggagctaaacgttttgtacctggtgatcattggtcgacatacagctatattctaatcacacatcacattctcgcattagacacagatgccattatctctgctttcactcatccatgaaat

SEQ ID NO: 1930 - DNA, 247 bp, Lilium asiatic
aaagaaaatgggtttctgactccgatggcgctcaagtaccaatttctatgtgtttatcggaagaaccttgtcaagctcgatggttctgatcctctattgctttacagatatggttcatatgaggcttgcatagatccttatttcaagtcctcgagggtgtctttgatagacaggggctttatttatgtaatagctcacattcgtgggggtggtgaaatgcgaaggcacgtgtactaaaacgggaagt

SEQ ID NO: 1931 - DNA, 411 bp, Lilium asiatic
cggacgcgtggggtcgtaaagaagacacagaagcaggtcgtctcctcgaaagaaattcttcagggaagctcctccttgagctcaagatctttaccgagaaaatccctaacatctgcagaaaaactgaagctgaggaaacagttgacagaactgcctgttgaagagatgccgctgtctttgcttggatttcttcggagaactgtttgcttggaccaaataaaagtgccactgggttggacattaatggtcttgaccataaccctttgggggaattgcattaaacctggaaaaaaatgtttggatgtgagatgtacaaagtctgcagatgttgggagaaaatgttcacaggtctcagttaagatctcgttcaaaggcaggggaggaaatattctgagatatgattgtgcgaag

SEQ ID NO: 1932 - DNA, 168 bp, Lilium asiatic
cgcgcacgtgggggcatacagaaaacactaatgctagttttgtgcaaccaagaagcacgggggggaagtgccagcttgagcgcaagaatgataccgagaaaaaccataacattgagtacaccaagtggggcggtgaaaacaccgaagaggactgacctgtgaaaagac

SEQ ID NO: 1933 - DNA, 420 bp, Lilium asiatic
cggacgcgtgggagcatcgctattctgagcttcaagctgactttcatgcaaggcaaagttttccgagaatccccccttcaaagatgcttaggcaagctgctaatctatatacacctgtagtgtttgaaatctttcgaagggagtttgagatgttcatggactgcatgttgtacggttgcggcgaggttgatactacatccgaatacaaagttgctgtcacagagaaaccgaaagaacactttgttagatttgactcagctgataattctgtgatgtgtagttgcaaaaaggtttgagtttcgttggtatccccatgttgtcatgtgttgaaagtgcttgatttcagaaatatcaagcaagtgcctatgaggtatttcttaaagaggtggagaaaggatgctaaaacggacgatgaaaaag

SEQ ID NO: 1934 - DNA, 345 bp, Lilium asiatic
ccgctttgatgttggtgtgaaggaaattgagccatggactgcaagattgctcccttcccgtcagtttggttacattgtgctgaccacatctgcggggatcatggaccatgaagaagctagaaggaaaaatgttggtgggaaagtactcggctttttctactagattggcttttactgagaggatggacttttcctttcatgttttcctgagtcttgaatttcggatctgagacttagaagctctgttttgtagtttgctgttgtgatacatgcttgagtaggattttaagatgaattatctcttaaattaaactttgttggtggcgtttgcaatatttctctttg

SEQ ID NO: 1935 - DNA, 101 bp, Lilium asiatic
cggacgcgtgggtgcgatctgtcttctcacaggcaaatttatcatccccgagataagtaactatgcaggcatatggttcattcttctcttcgtctccatct

SEQ ID NO: 1936 - DNA, 339 bp, Lilium asiatic
accggggtcgagcacgcgtccgcacagccgtactgcgtagagaggatcgtctaacagaacagcattaagatggtcatcgctctcgtggtgtgccgggctctttcagctgccaccgcctctgcaatgcatatgccctgcccctgcgcggggctgcagggcttgtacggcgctggcgccggcctgacgacgatgatgggcgcctgcgggctgtacccctacgcggagtacctgaggcagccgcagtgcagcccgctggcggaggctccctactacgccgggtgtgggcagacgagcgccatgtaccagccgcttccggaacagtgctgccagcagcagatg

SEQ ID NO: 1937 - DNA, 423 bp, Lilium asiatic
gcttgccagacttctggttctcaccggagaatcacacccgatatccgatgtcatgaggctatcatatggaagagcagttatttggttggcatggttcacacgggaggtgatttgagtggtgacttgattcaattttataatatataataattcatgataattttttttctagttacttccttgggtcattacataggattatgataacaaattttcacctgacttaagcgtgtattccataattttttccctgcaaccttaaattatcgtgattctatcttctctaaacgttattaccaccgagcaatcaccggtcgtaccactaatgtatggggaagttgtagccttttgagaccgattattcactttctttattatctatcaactactaccacttattaaattgcagcatgttttttcttt

SEQ ID NO: 1938 - DNA, 269 bp, Lilium asiatic
tgcatacacaggatgaaaattgtacatcgtcttctgaaaagcgcaaatcgccttgtgaataaacattggacggtgaaaatatgcgattttgggctctcacgagctatcacagatgctccaatgtccgatagtttcttcgcgggcactcctgaatggatggctcctgtacttatacgaaatgaacattttaccgaaaaatgcgatattttcagccttggggtgattatgtgggagctttgcaccctaaataggtcatgggaaggcgcacc

SEQ ID NO: 1939 - DNA, 190 bp, Lilium asiatic
accggaaggcgcatggaagctgatcggcggcatcccccatgtggggtgcaccttatgccgagcctgatctttgtgaaaggggttgagtgggagcattcctgtcgagacccgaaagatggttaactattcctgatcggcgcgaaaccataagaaactctggttgaggcccgcagagatacttacgtgcaaa

SEQ ID NO: 1940 - DNA, 414 bp, Lilium asiatic
gatgaattctgctgctgctacacaggctaaagtcgaggagcggaacagtagtttacctaaaggtgatatgaggagggaagtgatgacagagtctacacggtcgcaggcttgaaaagaacatgggcaacctaatgtggctaaagcagaagattcaacagtgatgcatagcaagtcgaatggttcctcggaagagggaaaagatgttgagatggctgaggcaaaagtcgattaagcaggagatggggggtggctttaatatactgaactgtttttatgctacgcaaaagatgtgtcagacatctgggaccattttaatgtcaactgggattgtaatttatgaacttgattgaaaggcataacttactagctgaatcatgttcgagacgtgttaagcttggaggatgtttagtcatg

SEQ ID NO: 1941 - DNA, 354 bp, Lilium asiatic
cgatccgccggccctttcctccgcgccgctcaacctcacgccgccagcgagcaagaaatggctggacataggattgcacacgtcaccctgaaggggccaaatctggtgaaggagatcttcatgggcatcacgctgggcctagctgctgggggattgtggaagatgcatcattggaacgagcagaggaagaccaaggccttctacgatatgctcgaaaggggtcagatcagtgtcatcgccgcagaagaatagcttcttgccccatgaataggaactttgttcttctctattggtttgaatgagcttgtggacgttgaggaacattcccctggatttgataattcgggtttatgc

SEQ ID NO: 1942 - DNA, 338 bp, Lilium asiatic
gtcctatacaagatgatcaccatataatcttacggggcacaattttcaattgaaacgcacatagaggcctcatgatgaccactttaaaagcttaaaaaggcacaattttctgttgaaatgcacttaagagacgtccattccagtgtaccctgatcaacttccaccaatttacccatttgtgttccaatttgcattgccctcttgtcagtccaacaattaaatgggaggcctacagcattgagccaggtggcttcttcaactttgactgctttcaaggtagggcaccatctatttgctataattccttcttttatgcacaatctgggaataggctacca

SEQ ID NO: 1943 - DNA, 368 bp, Lilium asiatic
cggacgcgtggggccagcatcaagtcccaatcatccacatgcggtacaaagaaccaagctgtaggaggatcaagcggttcggagcaatcacacaatgaatcactggatattgaggctgcgtcatgtgaacaaggcactggtgtatcagatttaaagcgcatgagaaggatggtgtctaatcgtgcgtcagctagaccatcgaggaagagaaagcaggcccaattggctgatcttgaattgcaggttgatcaactaaggggagaaaaatcaaccctatttaagcaactgaccgatgccaaccagcagtttagcggcgcagtcactgataacagggttctcacgtccaatgtggaagctctaagagtgaa

SEQ ID NO: 1944 - DNA, 353 bp, Lilium asiatic
ctcggctagatcgcgccgaaaccgcacaaacctcgtcctcaatctccatggcgttcaacaccgccgaccagctcatcttcggcgccgagggcgtgggggcggtctctctcgccctctaccttgtctccaccgacatcgaagggcctcagaaagagatggacttcacgatgggctcggtccacgagcgcgccaaggccctcatctacgtcgtctgggggctggcctacgggatcggcttgggggcgctcaccaccgccacgatctccattgcttcgtatctcaaaggttgatccattgcgaaggagggaggtatgaggagaactacgttagggtttcgatactgggggggtttg

SEQ ID NO: 1945 - DNA, 110 bp, Lilium asiatic
cccggcgaccggccgattccgtcgccacgcgtcgcacgcgtcggacgctgggtgaaccctaccgcaagactatacctcgagtagagagcagcgataccatcgacaatgtc

SEQ ID NO: 1946 - DNA, 392 bp, Lilium asiatic
  modified_base (341)..(341): a, c, g, t, unknown, or other
ccctctttccctctttttcaactaaaatcttcaatggctcccaaggctgagaagaagccggtggcagagaagaagccggccgaggaggagaagaagtcggtccctgcggagaagaagcctgccgagaagaagcccaaggcagggaagaaggtcccggccttcaaggagggggcttctgacaagaagaagaagaggtcgaagaagtcagtggagacctacaagatctacatcttcaaggtgctgaagcaggtccatccggacatcggaatctccagcaaggccatggggatcatgaacagcttcatcaatgatctcttcgagaagatggcacaggagttcgnccgccttacccgctacaacaagaagaacaccatcaccttccgggagattta

SEQ ID NO: 1947 - DNA, 355 bp, Lilium asiatic
cccacgcgttcgcccacgcgtccgcggacgcgtgggggaggagctaaactggttgtgccggctggtagttggttgacagggagctttagtctcatcagccatctcactctgtcattagacaaggatgcgataatactgggatccactgatccatcagattggcctctcattgctccacttccttcatatgggcgaggtagggagctgccgggtaaaagacatcaaagcctgattcacgggtacaacttgactgatgtgataataacaggtgataacggaacaatcaatggtcaaggcagtgtttggtgggacttgtttaacaataaatctcttgattttacttgaccacattttg

SEQ ID NO: 1948 - DNA, 142 bp, Lilium asiatic
  modified_base (7)..(7): a, c, g, t, unknown, or other
ccccctncccctctgggacaaccaaaacctttaatgagataccaaggctgagaagaacccggcctctgggaagaagccaaggcgtagaggagaacaagacaaatctcctgcggagaaaaagcctgccgagaagaagcccaag

SEQ ID NO: 1949 - DNA, 334 bp, Lilium asiatic
cttgttaaacattatattattaaattcacatgttataacacttgttaaataccctctgatgttaggatctaatttacaccctatcttatagataaaacacttgtataaggtccagaatgtacattacatgtggttgttagtaccaataggctctgaaaacacatagagacaataattctttacaaaataatttcgtaacaagagttaaaaagtggcaaatacataaatatgtctcattgttcattgtttaactaaatgattcattattttttatagaatgttgaccatatagtccttgtccagataatcccttgttatataaatcattttctat

SEQ ID NO: 1950 - DNA, 187 bp, Lilium asiatic
cacatgttataacacttgttgaataccctctgaggggtggagcgaagttacaccctagtttatagataaaacacttgtataagggccagaatgtacattacatgtggttgtgaggaccaataggctctgaaaacacatagagacatttattcttacaaaataattcgttaacaagaggtaaaaagtg

SEQ ID NO: 1951 - DNA, 407 bp, Lilium asiatic
gtggaggaagaacttcatttgcttttcaaagtcataatcaggtatattaccctcttttggcatctgtgaaagtatcatcagtgttggagaagattccttctttgaaggcacaatcaagtatattgcccagggaaattcattcaatcagcttgaatccttcttgtccgtatcaattagcattccatcttgatgatggctggtctggagtcctaaacgtcagcagccttaatgtgacgcacatgcattgccctcctccggcttggttggatagcagcatgtcagccagttcttcagatttgcgaaagccatcatggctgccaaacttttctatctatgcagctggctgctcctttagtaatggcatttatctactagatttttaccccaacacaagctcatcatgccat

SEQ ID NO: 1952 - DNA, 321 bp, Lilium asiatic
ccccgatttccttttcggggattacatggatatatatgctaagcagaagtttctggcaaaggagccgaggttccaagcagtgaaggcgacatagaagaagatacgacagattgatgaagaatatgcattcatgaatgcatgcatgtgtgtgtgatggtgtgattacttaggtttaagatttgtgtgcttatattttgcttgaagcttcctccaccttcagggatggaaggatgtgttgcatggcgcttgtgtgttttattttacacgtgtttgcatgaagttggggtgcgttgcatgtttttaaattgtaccccaagttat

SEQ ID NO: 1953 - DNA, 124 bp, Lilium asiatic
tcacgatccatcaatccgatcgatctgtcttgttcgttaagaaaccaaacgtgtgcatggttaattatataagacgtgctcttcttcagatcatggtgaattgaaagactgccaaattaaggcc

SEQ ID NO: 1954 - DNA, 484 bp, Lilium asiatic
ccgcctctcgagtctcgtccacccgtcgtcctcctagctcctctactcgccagtcgccatgggcaagattaagatcggaatcaacggcttcggaaggatcggcaggctcgtggccagggtcgccctccagagcgaggatgtcgagctcgtcgccgtcaacgaccccttcatcaccacggactacatgacctacatgttcaagtacgacaccgtccacggccactggaagcacagcgacatcacactcaaggactccaagacccttctcttcggtgacaagccggtcaccgtctttggcatcaggaaccctgaggaaatcccgtggggtgaggctggcgctgagtacgtcgtggagtccaccggcgtcttcactgacaaggacaaggctgctgcacatctcaagggtggtgccaagaaggttgttatctctgccccaagcaaagacgcacccatgtttgttgttggtgtcaatgaggacaagtac

SEQ ID NO: 1955 - DNA, 422 bp, Lilium asiatic
tgctgcttgattttttgcttcccgctgccttttcttgccgaggaggtctgaggtggaacggatcgaggcggctttccgcggtgatcgcttcgcattgccttgcgtcgtcaggggaacggggcgatgattgagaggtcgacgggcgttgcttagccgcgtcgttgcgatcgtttagtttgctatctacatctgtagtagcccaatttatgtgtgtgtttttctgacgcaaattggcgtgcttttgtgtgggtatcgcacttgcattgcatgccctcctttttacaattgattcattcacacttcctccccctcgtcgaccttttcgtcactccttttccgttcatagactttatttccacgttgagctgggattgggtagctaaagttattgtttttgagacagggctacacttgattgggag

SEQ ID NO: 1956 - DNA, 428 bp, Lilium asiatic
cgggtgccgacctcgccaaggtgcaacgtgccgtgtgcatgatctccaactccaccagcggggtcgaggtgttctcccgcatgaacagcaagttcgacctcatgtacgccaagcgcgcgttcttgcactggtacgtcggcgagggcatggaggagggggagttctccgaggcacgcgaggacctggccgccctggagaaggactacgaggaggtcgccgcagagggcggcagtgatgacggtgacgaggaggaggaatactgatctgcttgcatgaatctgtttggctgtcgagccaggttgtggtgttgaaaaacctttgtttgtgtcctggcccccctgggtaatgtttgggtgtttccttccatcatcacttgctgaactgctctagtatttgcatttgtaattgaagtctgtcgctttaagcac

SEQ ID NO: 1957 - DNA, 406 bp, Lilium asiatic
ggttgtacagttttgcgacagttgtgttgtctatgatcaagatctatagttggagcaattgggaaagccaggctagtgagaatttgccagcaaagaaacccaagttgatgaggaggcaatcgacctttatttttcatcacacctctcatccatggatcaagaacaaaattcttatttggatgctttgtttcatacgtcaattcaagggctctatagcaaaatcagattacatggcattacgattgggttttatcactaatcacgagttaccactttcatatgatttccataagtatatggtgcggagcatggaggatgagtttcacgagagtgttggaattagctggcccctttggctctatgctatagtgttcattttcataaatattcatggacttaatatatc

SEQ ID NO: 1958 - DNA, 395 bp, Lilium asiatic
ttcccgggtcggccgagcctacggggctgcggagcgaccgcatggtcgccgtcgccgtctctcgagccaattgccttctcgtcagcggccctccgggagtggggaagacgacgctggtgatgcgggtggtggagatgctccggagatctcaccccaatcttaacattcgcggcttctacaaccgggaagattcgagaggggaatgagagggtcggattcgaagtggtcaccttggacggcagatgtgggcgactggcttccactacagtttcaagtgcagagtctcacagatgggcctatggtggcaaatataaagtgtcatctcaccttattcgaatccttagcattgcccgaattgcaggtcaaagaggatatacgacttttcattattgatg

SEQ ID NO: 1959 - DNA, 306 bp, Lilium asiatic
ttacaacgtggggaggtgggcctactccacaagctgccggacgacaccatctcaggctaccgcccgtacaccgtgctctggacggtatgtaagaaacctatccttacacacttcgtcatgatcaatcatccgtacaatgacgctctttcactcgtgcctccctcacccacttgagttatctaagacacgccggtaaaagtcacacgctacatcatacatcaagcgccctccttgatacaccactcatagtcgaggagctcggcaagcactccatcgcactgaccactggggactacccaccccatc

SEQ ID NO: 1960 - DNA, 138 bp, Lilium asiatic
taattcctcctcctcctacttctacatccttttctccaacgacatcaccgaccgtcaaagcgctttttcaaccggcttcggcttccttaccttctccttctatatctccattctccaccctatccaaaacattaactt

SEQ ID NO: 1961 - DNA, 393 bp, Lilium asiatic
gctggcgcccctgtgaagtaccctatttctcaatacaaacccggtagtaatactgtcaatacaaaccatgttggaatgcctacatatggcacctacaactcaaacccagccgtttatggttctattcctgcttcaactggtgggaactcaactggtcctgatgatctagcaggatcccaatacaaggaaaataatgtatatatcactgggcagcagcagagtgaaggttcgggtgtttggattcctgcaacgggcagggacatttctgttatgccggtgaattcattctatggcctatcccctcaggcccaacacttggctttcacaccaggacaacctggccatggtgtccgcggtgggatgtaccacccagcccaagatctggctgcagca

SEQ ID NO: 1962 - DNA, 390 bp, Lilium asiatic
acttgagcaccaaaaataccattctgaagatatatgatggcaggtttaaggacatatttcaggaggtatatgaaaagaaatggaaggcaaagttcgaagaacgattaatatggtatgagcatcgcttaattgacgatatggtggcgtatgcagtaaaaagtgatggtggttacgtgtgggcttgcaaaaactatgatggcgatgttcagagtgattttcttgctcaaggatttggttctttaggcttaatgtcctcagtgctgctttcatctgatggcaaaacattagaagctgaagcagctcatggaactgtgactagacattttcgtttataccaaaaaggacaggagactagcacaaacagtattgcttctatttttgcatggagcc

SEQ ID NO: 1963 - DNA, 470 bp, Lilium asiatic
ctctgccacgccgtccctgcatcctctcgacctctccgtcatcactcgcatccctgccgtggcgcgtgctcgacccacgtcacgagtcgggcatgaccttcgaccaccggccctccttcaccgtcgaccacgcgctcagctgcgcctaggtcgccggcaccgacgaccacgaggatgacctgctcctctgtgagacctgctgctccggcgaccgtgacctgctcctttgcgaccgcgagcttcacatcttctgcctcctcccatcgccgccaaggtccggccggccgccccaccctgctatagctgtggatcagtggatgcgcgtccacccctgggtgtgtgtacccgccgaacgccatggatcggagcgggaagaggagaaagaggaagaagcgcggtgacgaaagggccgccgccggtgcgccctcgccctcctccgcttctttcgacctccactttttccccgtcct

SEQ ID NO: 1964 - DNA, 402 bp, Lilium asiatic
  modified_base (3)..(3): a, c, g, t, unknown, or other
cgncgcgtgggtttttttaacggtaaatagtcttggatataagtccaaattttaaagaacttattacatgttgataatgctaggaataaaatgttgctgcagagacaaccaagatcaacttggaaagaactaattggtgcagagactccctatgagtttttactggctcagatgtgatttttgaggaaatcgaggacaagcttgttcaccagttcgggaaattgttcctgtaaaaaatgggtcccatctggatcagggacaaaatgcttcactgcctcgctcctcacatagtcctcgatccccgggaatttaatcacatagtctgcttctcccatgatcagcagagccggcagatttaccttagctttccccgcaactgttgtctgagatagtatcctgtat

SEQ ID NO: 1965 - DNA, 483 bp, Lilium asiatic
atccaattgtcacttgctctccctccaacaagcttattaaggccggtcatccctcttctagctcgtttcattatccatggcggaggagaagcaccaccaccaccacctgttccaccacaagaaggacgaggagcagctcgccggcggcgggtacggcgagtccgcctagtacacggaggccacggtgacggaggtggtgtccacgggcgagaacgagtacgacgagtacaagaaggaggagaaggagcacaagcacaagcagcacctcggcgaggccggcgccatcgccgccggcgccttcgcactctacgagaagcacgaggcaaagaatgacccggagcacgcgcaccgccacaagatcgaggaggaggtcgcggcggcggcggccgtcggctccggcggcttcgccttccacgagcaccacgagaagaagaaggaccacaaggacgccgaggaggccggcggcgagaagaagcaccactt

SEQ ID NO: 1966 - DNA, 134 bp, Lilium asiatic
ctcctttagacttctctcttctcaacttgcctatcctcccccgccctgtcgccaccaggagcccattcaacgccgggcggcgatccatctgccataacctgacgaagagcgggccggagctgtctatctatatt

SEQ ID NO: 1967 - DNA, 413 bp, Lilium asiatic
acaaactgagtgagtatcacgagaacaactttagattgcgtggaggccgctaatcccaacttacttgcggcgcacgtcaaagaacctgctcccaacctcaactagacttcgacgaaaccatcatcttttaatagcaccagcgttaagaatgctgatcacaatccctcagaaaccaaaacgaaatttaagaccagcaaactatcaacggctaccaaaatgtgacctacaatacgtttgtaatgtaatgcaacttccatgcattattgaatccatgccatgttataaatctataccttcctttcttatatctaacatcatactcggcatgtgctatcacttatgtgttatgatgccagattaatactactataaaaatctcttcccttactttcttgaacttttttatttactta

SEQ ID NO: 1968 - DNA, 400 bp, Lilium asiatic
cggacgcgtgggtgaagaaactgctgaagaactacagactcaaatggagcaagattatgacattgggtccactattcgagacaagatcatccctcatgcagtttcatggttcactggagaggctgctcaagatgatgatttagaggacctggaaatggatggacttgaagatgatgacgacgacgaagatgatgaggaagacgaggaggatgatgatgaggaggatgacgatgaggatgacgaggaggatgaagaggagggtagcaagtccaagaagacaaccagaaagaagaagagcggcgctgatggtcagcaggtggatcgaccggccgagtgcaagcaacaatagtgatatctttgtgtggatgtcattgtgaagtggttttagcatgggttattt

SEQ ID NO: 1969 - DNA, 259 bp, Lilium asiatic
gggggagccacgcgtgcgaggactctttttttaataaactgctttttaactacttactcaaatggagcaagatgagtacattgggtgcactattcgagacaagatcatccctcatgcagtttcatggttcactggagaggctgctcaagatgatgatttagaggacctggaaatggatggacttgaagatgatgactacgacgaacatgatgaggaagacgaggagttttattatgaggatgatgaccattttggattt

SEQ ID NO: 1970 - DNA, 363 bp, Lilium asiatic
ccctccgccgctcttcaaagtcccatgggagatcaccggcccctgcgccgaccccgagtaccgcctcgccgtccccggcgcccttgagtaccgacgcttctgccccgctacccagcccggcaagcccttcgtcccctacgccaaccccgaaactgtgtacgacatcaagtactacacccgatacctacgccgcatccgcccgcccgtacgacgattcctgctcaagaaggctgatgtggaacgtatgatggcgtagaagaagttcgatgtggatgattttcttatagcttatgtttacgtggcagaagctattgttcttcttggtgcgccgaattatttatttttggtataatcaaacgatta

SEQ ID NO: 1971 - DNA, 370 bp, Lilium asiatic
acgcaccaatataaaactatattcctatcaactaacttttactacacacacaaccaatcaacaacagtaacctactaaacgccaagctgcataccgtatcccaaaacccttccacatacctgccccaacatatcttttttatatgttcaccttaattcaattcacttccctttttttaacatcatcttgactaaaaaaactctacctttaccaaatttaatctccatatcatacatacccttttttccaattgacttatttatattttctcctatattattcttattttcaaacaattatacatccttattttttaaagggacttccttttttttttattatttattcacttaaaatatattatattttt

SEQ ID NO: 1972 - DNA, 395 bp, Lilium asiatic
gaaggatatctatatttatgggttagtgtcttggtatctttctcttttatgtttgggatgcatttaaaagaatagaagtcagtttaacttgaactaatacataatattgcaggggagagaaggcattttgtagttgtgagtgtcgcgataaagagattttgattgaagagcaaatggagaagcctacagctgatttttctgattcggctgaatcatcgacatttgagctggagattcttctctagctgattggggtttcttttcaatccaatcgatccgtgagtgatgaagatgttgaggtgaacgattgaatcatctgttgacaagagctgcgtgtgttaatctgtagcggccatggatgatcgcaatgtatattggtttgtttgctgaatctg

SEQ ID NO: 1973 - DNA, 363 bp, Lilium asiatic
cctcagcacgtccaataacccgtcttatttaacatgggggccagccacttaatttctcatcactttttctcccaaccacatcctttttatcattattttattcatatatggcgcttaaaacccttttttttcctaccttatttaaaaaaccaatcaaattttttccattcctctatcaagcttttcaaatcatctaaaccacaattctcctacccctacttttctaataaacatttcacacatcaccattatacattttatttttaaattcactatcttaaatcatttcatcccttttataaatattcctcatttcttcttcattataaactcacttatatttctttatatccttaactcttt

SEQ ID NO: 1974 - DNA, 444 bp, Lilium asiatic
cgccaccgcacagcctacatccgcccagaggagctcaatctccccctcgaggccccaaaacgagatcctctgcattcctgcgtaggcgcctcatcgttcctggcctagcacagatgcagacggctgcttcgtttgggtatgcggcgggacggggacctcggaagcgagctacaacgacgtcatgcagatgcaggtggatgttaatactgagatctatccccttagcgtggggaagaagtttactatggttttggctccgatgattttcaggataaaagaagttggaaccatctgaagtgtcttctctttaccgaagaataggcaatgaaacatcatcaggctgcaatgcggaagtatcatgcatcaggtgatctcttggttgaatctactcatattggtgacgatttctgtctttgtgagttttattttgcttgtaagtaaata

SEQ ID NO: 1975 - DNA, 359 bp, Lilium asiatic
agaacccggccatcgcttttggcccggccttggttagctggagctgggcgagccactgggtgtactgggctggtccgctcatcggtggtgctcttgctgggatagtctatgagatcttcttcattgatcatcattcgcacgagccgctcccctccgccgactattgatcgaatcgagatctttgagtttggagtttaaatttcgttatggtctttgttttgctatttgctttgaagttgtttcatcgtcctgcgtttgtttggagaatttgtgagaggagtaggtgttctctcagtgtataatgttgagcattcaggtggtggtgaaggtgatgcagtgatgttgctcttgtttttcaa

SEQ ID NO: 1976 - DNA, 405 bp, Lilium asiatic
atgatagcgaacaatccggtatcccaagagcgcaacattgagattgatgctcactatgttcgccagtcgctactactcaaaatcatgcagctatcctacgtatctaccattcttagtttgcatacttcaccaaagctcattcaactcaaaaggttctagtttctcatgcgcaaactcatgttgtttgacccaccttgagtttgtgggggcgtgttaaaagcaaatgtacgactcttggtataggggtggtgtaaatagtcaagggtagctttaacattgcaaataagatacttgtggggtgtaaataataatggtgtgtgtgcatgtagcacttatcagagatctggaacaggtaaataaggccaactgatcaaattagggtggatcaaacttgattattttctc

SEQ ID NO: 1977 - DNA, 203 bp, Lilium asiatic
gacccacgcatccgcccactcgtccggcatttttgaaggttttggatgccgatgctctttatgtatctcagaggcaagttaatgaagctcagactcatacacacacatcataccgtgctcatggacgtattaatccttatatgtctgtctccctgccatattgagcttatttggactgaaaatgaagaacctttcaagtaaat

SEQ ID NO: 1978 - DNA, 479 bp, Lilium asiatic
ttcccggtcggccgcgcgtacgccgagaggttgccatcaaacgtttctgggacatgtactacccacagggctactctttgtcgttctgtgtctacaagggggaggatgagaacaccgtctcctttgtgaccctgaacaaggttggtggattcctgcagcggatggacctgtgccgcaagtacgcctttgttaagatgctcgtgataggctctgagccacccttcaagctgaagggcctttggctcttccgtggccaggatgttcccaagtttgtaatggatgaggtctatgacatggagctctacgagtggaccaaggtggacatctctgatgaggcccataaagagcgtgtcaatgcgatgattgaggaccagtagcccttttagggctagaccttgcttgacgcgaaatgcttcaagtgagtgtgcttgcctggagacagaactgtttaacacttgaattgcctatggaagagtttt

SEQ ID NO: 1979 - DNA, 291 bp, Lilium asiatic
  modified_base (35)..(35): a, c, g, t, unknown, or other
acaatccggtatccctttatcgcaattttgagaangatgctcactaggttcgttaggcactactacttaaaatcatgcatttattctacgtatttaccattcttagttagcatacttcaccaaagcttattcaactcaaaaggttctatgttctcaagcgcaaactcatgttgcttgacccacctttagcttgtgggggcgagttaaaagcaaatgtacgactcttggtatatgtgttgtgtttatagttaagtgtagttattaccaattcaaataatatactttgtgggg

SEQ ID NO: 1980 - DNA, 465 bp, Lilium asiatic
tttttgtttttttttttaacataactatacgaattttctattataatcaatccaatccaacgcgcacttcacaaccgggggcgctcaaaacaaattcactctcttgcttgccaaaataattcctataaatcacgctttccttaacgcatctgttaaagaacgctaccaccatatgtcctaagagtctcccatgaaacataccagtactttccactttaaagaagcatggttatataaaatcacgataaacccatattcatggaactccaatcaactgcatttgtgtaccacatgctagagcctactgtacgcctatccacctggcatagtctatccacatctcataacccaaaaacgtattccctgtccaaactgcataacatgctgcactcaatactagattgtgctggtacattattgactctagcatccgctgtacaatcactccagctaaaatctggtacc

SEQ ID NO: 1981 - DNA, 400 bp, Lilium asiatic
acggcaatgacttctacaacaccagcaccacctgcgttttgccctccgtgtaactgctggtgtgactgctttaatactcggctagccgtattctctacctgcacaagagtccgtccatgactaacaagccagaagtgcgctcgcaaaatgcactgcacaaacgtcctaactttgcttgtcatctccatggctagccactgcctcaagtcatcgtcatcctccgacaccgactggaggaggaggcaacagcgcgagatgtccaagagctgcatggttctgacggtgaacgagccttacctggctatgaccttggctaggtcgtctaggcatgggccgtagaacggcacgttaaacgcgtggacctgctactcgtcgacgaggccatcggcggccatgtcca

SEQ ID NO: 1982 - DNA, 400 bp, Lilium asiatic
ggccgcaccgccaagcgccttggcaagtggtgggaggtcttcaaagaaaagcagcagagggagctcaacgagaacaacagagctatttccagccccatcgagcctggcaagtacgatcgcattctcgagaacttcgcggagaagctcgttaaagagaggcaggtcgtcccgttgctcatggccacaccattgctccctccatggctttcgaattcgaattgctcgaacccggttagaccaccctctccatctgtcaccctcactctctcgcaagcagcaccacggcctgtacactggctgcagacagatagaggagctgatagcaacttgaacatggctaaccaacaacataacatgctccctggtgtttcggccctcgatggtcatgttgtttcggagc

SEQ ID NO: 1983 - DNA, 396 bp, Lilium asiatic
cggacgcgtgggcggacgcgtggggttttgtaccttgatgaattagctgtttcacgactacctcgacaagttcgtcgtggtgtatcttgaagacatttttgtgcacaacatgatgttagaagagcttgtccatcacttgcggatagtgtttatagtgctgcggaagaataagcaatatgtgaaaaaggagaagtgctactttgtgccgggggagatcttgttcttgtttcattgtgttggcggtggcatgatccacatggatgagtaaaatgtccgtacgattaggcagtggtcggtgccaaccaaggtaacaaagttgagattgttccttggccttgttaactgctattgttgcttcattcttggcttcttaaaacaaactgcagtgttgatgga

SEQ ID NO: 1984 - DNA, 332 bp, Lilium asiatic
tcaaagaaaagcaatcagggggagcgtggacggtttcaacggacctatttccatccccatatagcctggctagcactaccgtattcatgggaacctttgtgtatacctcgttaaaaaaaagcaggtcgttccatagcttatggtcacaccaaagctccattcatggctttcgaatttgaattgctcggacccgggtagaccacccttttcatctgaaacccttaatttttacaaagcagcaccactggtctgtacacttgcttgcagacagatatgaggagcttgttagcaaccttgaacatggttaacccaacaacataacatgctccctt

SEQ ID NO: 1985 - DNA, 480 bp, Lilium asiatic
gttttgctgctctccgaccccgagctccgaaggccgcagcatcagtccccctcgcgtgtggccgagatggcgctgccgaatcaggggaccgttgattaccccagcttcaagctcgtcatcgtcggcgatggtggaactggtaaaactacatttgtgaagaggcatctcactggagagtttgagaagaaatatgaaccaaccattggtgtggaagttcatccgttggatttcaccactaactgtggtaagatcaggttctactgctgggataccgcagggcaagagaagtttggtggcctcagggatggatactatatccatggccagtgtgcgatcatcatgtttgatgtaacctcaaggcttacttacaagaatgttcctacatggcatagggacctgtgcagggtctgtgaaaacatccccattgtcctctgcggtaataaggttgatgtgaagaacaggcaggtcaaagccaagcag

SEQ ID NO: 1986 - DNA, 478 bp, Lilium asiatic
ggcgaacgcgatctgttccccaacctccgcagccgctccaccgccctccactccggctggggaatcgacccgccccgatccagatcaggagctgagggatggacgcgaacaggcgccagagtgggatccagcagttgctggctgcggagcaggaggctcagcaaattgtgaatgccgctagagctgccaagtcagcgaggctcaggcaagcaaaagaggaggctgagcgggaaatagccgaataccgtgcccagatggaggctgaatttcagaggaaggttgcagagagcagcggcgactctggtgcaaacgtcaagcgtctggaggaagaaacggcggcgaagatcgagcaactcacccagcaggccgcaagcatctccccagatgtcattcagatgcttctgcggcatgtcaccaccgtcaagaactgaggaatgctgttcccgaactatgctcgcagacttgtaccgtcgatcta

SEQ ID NO: 1987 - DNA, 454 bp, Lilium asiatic
cgctgggcaccgtggccatccttcgcaactgcgctatcctctcctgctgattcctgctccggagtcgtctcgccaagaagtggccgcacgtctactcctgcaacgcgctcatgtccttgctcagcttcctccaggtcgccgtcgtcggcctctgcacccagcgcattatctccccctgcatcgtcaccagcaagttcaacatcctcaccgtcctatacgccggcatcgtcggctgcggcgtctccttcgtgctggtgacatggtgcatcgagaagagaggagccgtgttcgtggccgacttcataccggtcgtgcagatcatcgtctccgtcatcgacttctacatcctgcacgagcagctctacctcggaagcgtgctgggatcagtgctagtgatacgtggcctttaccttctgctgtggagcaagaggcaagaggccctgcactgtactcc

SEQ ID NO: 1988 - DNA, 476 bp, Lilium asiatic
ggcggcgctccgaggaggtggcggtccaggcgggtaggtcgtggaatggctgtcctccctggggtccggaatatggagaatacaggtgtgtttcagtggaagcagctgctggcttcctctgggccaattgtgtaactttggcatttgggaatagagataagcgaagcagcagcatgaatgtatgctcaatcaggttatagttatggttcctcaatggctaacaggtgcaatggggattcatatgatgacagtgttattaactgcagtcaagttaccgtttcgaaggatgtttcttctatggaagcttcgaatgacttcacatggttgggagcttcatggaaatgccaacgaagtttgaagcactacaaatctttctgccgtagaggaattactatctcggtgcatagttttgtatacattatgggtgaagagatgaagagacttattgcttatgtggaagtgaatatttgattggg

SEQ ID NO: 1989 - DNA, 393 bp, Lilium asiatic
cccttatctgcgtagtgacaaccaataatttgtttcattgtggcctttctttacgtagtgactgttacatgcccaaatgtgtattatttacttatattttcaataagataaccatcaaatcaccatcataacacctcatcttgaccacatattcactcttcactatcatttcttgacttgttcacaccaaagtcttttcttgaccatcttatggacatttgtgtgctagtctatattcacccatcatttggccctcatacttattaatcacatgacatcatcaccattatcacaagtctttggtccttattttagcttacctagttgacctcagagagctaatgcttgagtgagaccttgaaataatagtggatgcccatatcaatttcccca

SEQ ID NO: 1990 - DNA, 475 bp, Lilium asiatic
ctttctcctccgtgctgatcggcagtctctaagctttgcaacaactgatagccgaattccgggcgccggtccctaaaaaaatgcaagtactaggaagtagataagatgcatttccctgtaatttttcgttattatatatactcagcacgggaaggaggggagacactctgttcaaccaccagccgagttcgcagcggcactccagggtccaggcccagcagcctcttcggctcttcgttgggggtgcgtggacaccggaaattgcctcggggattgcgttcctgatctaagcccggcatgaagggctgctcagagcgtttgctgctcctgctgctgctggcatcgtcgttgttactgtccgtcgtggttgccgcgcagcagacttgccctgccgacctcgacagcaaatgcgacggtggcgcgcctgatgactgggagggggaattcttccccggcgtcccgaaaatcaagtatg

SEQ ID NO: 1991 - DNA, 494 bp, Lilium asiatic
ttccgggtcgagcgcgcgtacgggaaagcacatgggttcagagcttgtgcagaggttagcaatcaatgacatcgctgagagtgtaatgggattcaatacgaattgcaaggacactggtctttttggtgtctatgctgttgctaaggctgattgcttggatgatttggcttttgcaattatgcatgagatgagcaaattgtcataccgggttacggaagaagatgttatccgtgcacgtaatcagctgaagtcctctatccaactccaccttgatggttcaactgctgttgttgaggacattggccgtcagctgctgacctatggacgaagaattcctacccccgagctttttgcaagaatagatgctgttgatgcaagcactgtgaagcgtgttgcaaaccgcttcatctttgatcaggatgttgctattgctgcgatggggccgatccaaggacttccagactacaactggttcagacgccggacctacatgc

SEQ ID NO: 1992 - DNA, 485 bp, Lilium asiatic
  modified_base (60)..(60): a, c, g, t, unknown, or other
cgcatactgcatacacaacacagagcatcagaagcagctgcgatctgatcgacatggctncggccaccatggctatcacctggcgcgcgctcgtcggcaagccggcggctggcacgagggacgtcttcggcgagggccgcatcaccatgcgcaagaccgccgccaagcccaagccggcggcctccggcagcccctggtacggtgccgaccgcgtcctgtacctgggcccgctgtccggctcacctccgagctacctgaccggcgagttccccggcgactacgggtgggacaccgcggggctgtcggcggacccggagaccttcgccaagaaccgcgagctggaggtgatccactgccgctgggccatgctcggcgcgctcgggtgcgtgttcccggagctgctcgcccgcaacggcgtcaagttcggcgaggcggtgtggttcaaggcgggctcccagatcttcagcgagggcgggctcgactac

SEQ ID NO: 1993 - DNA, 492 bp, Lilium asiatic
ggtcggccgacgcgtacgcccacgccctactcctgcttcttgcttgtgcggtttgcgctgagcgcggcaggggggtaggcggtattaaagaggagacgggggtccgcctgtctgcgccggggccgctggagacgtgcggcgcctcgccgccgcaggcgatgctcgagagcatgaatgactactgtcaggatggcgccttcaccctctgggaccatctctcgcccgaggaccgggagctcctcgtccggtacatcgagagtctagacctctcaaggatcgatcggatcatccggctctcccttggatcacaaggcatcccattgcctgctgacgagcccgttccgaaatctagtgtctccaaggtggaggacacgtctgcagaggacaaagaaagatggtggaagaaggggttgaaagccatctcggaggggaagctggccgttgtccttttggccggtggtcagggtactcgactgggaagctcacatccta

SEQ ID NO: 1994 - DNA, 380 bp, Lilium asiatic
tgttattcattttgctggactaaaggcagttggtgagagtgtccaaaaacctctgctgtactataacaataatatcattggcacaataaacctcttggaagtaatggctgctcatggatgcaagaagcttgtgttctcatcatctgctactgtctatggatggcccaaagaagtaccctgtacagaagaattcccactttctgcaacaaatccatacggacggacaaagttgtttatcgaagagatatgccgcgatgttcaccgagcagactctgaatggaagataatattgctcagatatttcaatcctgtcggggctcatccgagcggttccattggcgaagatccccgtggcattccaaataacctcatgccctttg

SEQ ID NO: 1995 - DNA, 403 bp, Lilium asiatic
ggaaacacaaagtaacacaagctgcaaccctgaagactactacattgtctgattcgaatcaggtttcatacagaccagtgtcccaatcttctagatattcacatatgcataaatcaggtcttccaccgaaagcccctcggaaccataaagtaacagaagctgcccctcggaaccataaagtaacagaagctgcaactcgagagaatactgcattgtttgattcgaacgaggtatcgtacagagcgacgccacaatgtgcccgatattcacagatgaatagttctggtcttccaagcaaagcctttacagtagttgggaattacgaagtaaccatagcagcaacccgggggacatccacattgttagatttgaatcaggatgctgaaaattttgaggagaggag

SEQ ID NO: 1996 - DNA, 392 bp, Lilium asiatic
cggacgcgtgggcggtgatggtctcatattcaagctggaatggagttaaaatgcatgcaaatcgagatttggtgaccggattcctcaagaacaaactccactttaggggctttgtgatttcggactggcagggcattgataggttaacaacaccacctggagcaaattacacttactctgtacaagctggaatcaatgccggtattgatatggtgatggtgcccgaggattatgtgacatacataaacgatctcactacacttgtgaacaagggtgtagttccgatgagcagaattgacgatgctgtacggaggatactgagggtcaaattcatcatgggtctctttgagaatcctctcgctgaccttagcttagctaatcaacttggaaag

SEQ ID NO: 1997 - DNA, 217 bp, Lilium asiatic
  modified_base (42)..(42): a, c, g, t, unknown, or other
tgttattcattttactcaactaaaagttcttcgcgtttacgnccaaaaacccctgcgctactattgcaaatttatcattcccacaataaacctcttttaattaatttcttctcatctattcaaaatacttgcaccctcatcatctactactcactatatatcacccaaagtactttcccttctcaaaataatttccactttcttcaacaaatacata

SEQ ID NO: 1998 - DNA, 479 bp, Lilium asiatic
ctctctcctaacgaagaggagagggggcagaagataacctcgcgcgggggaggcgcgagggggatcgttggggccggaggagcagcggccggtggaggtggcgcgcgcggtggccgtccgagttgatttttgttctgctgctgtttctgggaagaggctaggggctacttcataggcattgtcatgtcgaagcgtgggaacgatggagtacatatcccctgagagaaatctggaggggacttgtggagatcctgggccgttatttgccgaccaaggtggcatcttgttggaccacttgggttatcaagggggaggaattccacaacatgagtctccaacactggatcatggacttttggttgatccagctggtgcaattccgtatttatctacagattctccgcccttcatgaatgatcaaatcacttgcaatgttataaaatctgcttcagctagtccagaatcttgtacaaaacaac

SEQ ID NO: 1999 - DNA, 460 bp, Lilium asiatic
ctcgctcgtggctgccctgctcatactgcttgccctcgccgtatcgtccacccgcaacgcgcaggatgattccatggccgacgaacaccgggacgttggcgggcggcatcaaggacgtgccggggaacgagaacgaccttcacctgcaggaactcgcccgcttcgccgtcgatgagcacaacaagaaggccaatgctcttctggggttcgagaagcttgtgaaggccaagacacaagtggttgctggcacgatgtactatctcactattgaagtgaaggatggcgaagtgaagaagctctacgaagctaaggtctgggagaagccatgggagaacttcaaggagctgcaggaattcaagcctgttgaagagggtgctagcgcctaaggatctctccttctgcatgtgcgagcctgaagctcaaagcaaagttgcagaataaggagccacctaccacatgc

SEQ ID NO: 2000 - DNA, 376 bp, Lilium asiatic
ctgtcagttctctcactaacctactacgcaatttatacgcaatgcacaccacttgatacgtatattttaaaaactgtatgctcacaaaaaatgtgctcatcactataagaaactttttaaagcaaatacatcacacttcattatctcaggactcacttctctccatttttttatttatatatcataacatacctaatcttaatccttgttaaaccaatattttcctgccaaagaataactgcactttttctcaaactacattttccttatcgctctcatcatctacaaagcaacatatacatcattccataccgattacattaacaataaatatattaaactttctacccataaataatatcattttaataccact

SEQ ID NO: 2001 - DNA, 389 bp, Lilium asiatic
caccctctctcgatcagtgccgcctcgccgctgccgctcttcctgggtcgaccggaaaagccgctgaaatggcagctgaagatgttgttgccgaaacccctgcccctgctcttggggagcccatggacctcatgaccgcccttcaagttgtcatgaagaaatcactggcccatgatggtctcattcgtgggctccatgagggtgccaaggcaatcgagcagcatgctgcgcagctctgcatcctggctgagagctgtgaccaacctgactatgtcaagctggtgaaagcactctgtgctgaccacaacgttcacttggtcactgtgcctaacgccaaaagccttggcgaatgggctgggctctgcaaatttgactctgagggtaaggcg

SEQ ID NO: 2002 - DNA, 413 bp, Lilium asiatic
cggacgcgtgggtgggactctgtctgtgctgaagcccggaccccatggttttcatggtcacgccctgggggataccaccaacggctgcatgtctactgggccacacttcaatcctgctggaaaagtgcatggagcccccgaggatgagaaccgtcatgctggcgaccttggaaatgtgactgtcggtgaagatggtaaggttacctttaccattgttgacagccagattccactctctggacctaattccattattggaagagctgttgttgtccatgccgatcctgatgatcttggaaagggtggacatgagcttagcctgaccactggaaatgctggaggaagaattgcatgtggcattattggtcttcaagcttgagttacctatccagtgtcgagagtgtggtcgtatc

SEQ ID NO: 2003 - DNA, 274 bp, Lilium asiatic
  modified_base (264)..(264): a, c, g, t, unknown, or other
cccacgcgtccgcccacgcgtccgcccacgcgtccgcccacgcgtccgcccacgcgtgcggcaattcttcagcggagagaagatggggctgacattcacgaagctgttcagccgcctcttcgcgaagaaggagatgcggatcctcatggtcggtctcgatgcggccggtaagacgacgattctgtataagctcaagctcggagagattgtcaccacgatccctactatcggattcaatgtggagactgtcgagtacaagaacantaagcttaca

SEQ ID NO: 2004 - DNA, 472 bp, Lilium asiatic
tgctttcagttccctgacgaacctacgaggcaacaaagacgcgatgcaaaggagttgatgcgtataatctcgagactatatccttgcaaagaatgtgctgatcacttcaaggaagttttgaaagcaaatcctgtgcaggcaggatctcaggctgatttctcccagtggttatgttatgtccataacgtggttaatcgaagccttgggaagccaatatttccctgccaaagagtaactgcacgttggggtaaactggattgtcctgagcgctcgtgtgatctagaaggcagcatcgacatcatgccaaaccgatgacatggccaagaaatcgcttgaactttctacccgtagatgatttcatttcaataccactcattgatgagcacttgagcaataccagggagataagaaagagaattcaggactccgtgctgacatagcagggcgtccatatgcttctgtatctttggcg

SEQ ID NO: 2005 - DNA, 369 bp, Lilium asiatic
  modified_base (49)..(49): a, c, g, t, unknown, or other
accgacgcgtccggccaatgggaaaatgatgcttgctcttgctttcagngcacaaggaatatcatttggggaggtgtgtttgtgggggggataatgtgctcaaccatttgagcattccggcagcctgcttcacacatccgtaaattagtatggttggcttcacagagcctcaagcatggtataaggctgaaaaggaggcgcttgagataagtgttgctaatacaagctttaaggctaatacaaaagctctagcataaaatgaatgggagggacttgctaagttgatattcagacctgacacggtggaaattcttggagttcacatcttgttactgcatgctgcagaccttatccatgaatcctcaaatg

SEQ ID NO: 2006 - DNA, 367 bp, Lilium asiatic
tccggatttttttgataatgtctgggcgcgtcaaatgcgggaagggtctcggcaagggcggcgcggagcgccaccgcagagtgctgcgggacaacattcagggcatcaccaagccggctatcaggcggctggcacggcgcggcggcgtgaagaggatcatcggtctcatctacgaggagactagaggggtgctcaagatctttctggagaatgtgatccgtgatgctgtcacctacacagagcatgcacgccgtaagacagtgacggcgatggatgttgcgtatgctctcaagcgccagggacgcactttgtatgggttcggaggctgatcttcttctctgctattctgggcttaaaggtttcgatt

SEQ ID NO: 2007 - DNA, 385 bp, Lilium asiatic
cgggggttcgcgtttgtggttatgggctcgttagaggaggcgcaggcggttatcgataaagtccactcttatgaattgctgggaaggagtttaaaggttgagtttgcaaagagcttcaggaagccatctcctgctacgccacgtgtagttgaagtagagacacggcataaaatatatgtatcaaatcttgcttggaaagtgagatccgctaatctcagagaatttttctcctccaaatttaagcctgtatcagcgagggtgatttttgatgaccggagatctgccgggtacggctttgtttcatttgctacagaggaggaagcagtggctgcctttactgaattagatgggcagagtttgatggggcgacctcttcgattgaaaa

SEQ ID NO: 2008 - DNA, 324 bp, Lilium asiatic
gtcgttggacgccgagagggataccctcattcggatggaggacaccatcgtcttggcgcggattgtgagggccaagcacccctacaacgccccggcctacgacgcttcctactgtggcggcgaccggtgcctcgtggatctcttcatccgcgatgcggaggctctccattctaaggtaggacggtatcagaatccagaggaggtcccattcttccctgatgatttacctgctccccaagtccctgcttttaactacccttaggcgttgcatacaaaagctgcttctgctaatgcgagcgatgccatatgggatatgtatttcaa

SEQ ID NO: 2009 - DNA, 366 bp, Lilium asiatic
cgcaaatatgggagagacgatgatgttattacttacaaggcattggatggtgttcaaattgtaaatggcttggagtgtaagatatcatgcacttcctctaaggtttcttatgttctggacaccgaagattatttaattcgcacacaaaagaggaagcgccattcatatggagttgctgcttcttgtcgtgaccggaatcaacttgctaaaaatagcaatgtcaaagtacagcgatttcgttcctttatatccagagcctaactacttgtataaagcaaaaggtccagctttttgctcgagggacacatatgaggcatgtgtgtgcgagtgctcacttgctctattcaaaacaactgtagctgttag

SEQ ID NO: 2010 - DNA, 403 bp, Lilium asiatic
ttatgccccatggtcttggacacttttttgggattgatacccatgatccaggaggctatgctaagggaacggagagactaaaggagccaggattaaagtctttacggactataagagaactgcaagagggcatggtaataacagttgagccaggatgctatttcattgatgccctactagttccagctatggaagactccattacatcgaagtactttaaccgtgaaaaaattgacagatacaagaactttggtggagtacgaattgaaagtgatctgtatgttacggctaacggttgcaagaaccttacaaactgtccacgagaaacatgggagatcgaagctgtaatggctggcgcacaatggccactggattctactgagattggagcctgactgatact

SEQ ID NO: 2011 - DNA, 389 bp, Lilium asiatic
gtaaaaagtgagatcatacaacttctagtaggaaggttagcggcatcagagagtttgccgttgctcattccggttcttcgcagtttaggtaatcttgtagctgctgacagttatgttacttatgagattctggttgttggagatagtattacagatcaagctatgacagctttactgaaatgcttgaaaagcgagcatcgcatcttgaaaaaggaagttatatgggttctatctaacatagcagcagggtcctttaagcacaaggagcttatttattatagtgaaaccacctctttattgctacatctactgtcaagtgcaccatttgacataagaaaggaagcagcatatgccttagggaatctttgtgttgctccagcagagggtgc

SEQ ID NO: 2012 - DNA, 374 bp, Lilium asiatic
gccaatgggaaaatgatgcttgctcatgctgccagtgcacaaggaatatcagttgttgagcaagtttgtgggaatgataatgtgctcaaccatttgagcattccggcagcctgcttcacacatccggaaattagtatggttggcttcacagagcctcaagcaagggagaaggctgaaaaggaggggtttgagataagtgttgctaagacaagctttaaggctaatacaaaagctctagcagaaaatgaaggggagggacttgctaagttgatatacagacctgacacgggggaaattcttggagttcacatcttgggactgcatgctgcagaccttatccatgaagcctcaaatgcaatagctatgggaacatg

SEQ ID NO: 2013 - DNA, 361 bp, Lilium asiatic
gcgatgatgtgacagtggaagcgggtatttttttaagatagatatggggtgtcatgttgggggtttattgggggtggcacatactcatgttgtttgtgaggggccggtgactgggaaggcggcggatgtgatcgccgtgcgagtcggccgcgtggttgcgctgaggcttgtcgccagggaagaagaatcagaagtgactgagccattcaaagttgctgcggcgtcaattgcaaattgtttaaggtgtgctagtcaccacttaacagttcgtgattgatggattaaagttatacttattgtctcaaatcctgagacacggtctattattgctgtttctggaataatgattttttgccctttg

SEQ ID NO: 2014 - DNA, 374 bp, Lilium asiatic
cacaaaagtctccagcaatggtatgaaaaaattgtacaaaaggctaaaaaggaaactattggtgcggaacacacaaacttatatgaccatttctttatgcctacttgcaaggccaaagttagtgctagtcgcttgccatattttgacggtgacttctggccaggagaagcatagaagttccttaaaaagtatgagtgtcaaaaaaaagagacccggagacaccgtttgagcgacaatttggaggattttcttttgatgcaacatataggagaaatcatgagaccaataaagcatgaatttatcatgatgcattttcaccatgtttgcaagcattgcggtcaacatattgtctctggaagccgatgggtatgcta

SEQ ID NO: 2015 - DNA, 333 bp, Lilium asiatic
cgataatatctgataatgagtcctgtttgatttttctgagtgaaaaaccactagggtaggtttgttcctcacgagtatctgagtgcataactgacaaggcaaattcacaaacattgctagctgaaccctccttccagagttaaacggcgactccatgcatatactacactatgagaatcttcaaaagtatgaccctcaaatagaatattttcatgacaaaccataccatcaacttgttcgtcatctcattgtcattgtacttattaacctttctgtcattcataataggctagaatttttctttataaatttaaaggtataaactttttttaa

SEQ ID NO: 2016 - DNA, 350 bp, Lilium asiatic
gggttacttggatattgccccaaccctaagtcgcattcaccgagggggtattcacccttggattagaggagaaggtggggagttcctacttggttgctttgaacctaaaagcacctttgaagagagagaacagctgagacaacgccggagagtgcaatactatagatggaaggaagagtgcagggaaatggattctcatgttggcagtgataaaattattacggctccaataattaccgaggacggggaaccaaaccaagatcctttggtgctccaggaagccggtcctgctcaatctcaaccctctactgcagacacagatgatgatgaagagtgcaatgagttctttg

SEQ ID NO: 2017 - DNA, 360 bp, Lilium asiatic
cggacgcgtggttccccgcgtaatatctgatcttactagtgaaaatgctctggtggtggaattttggtctgctgaagaagcaacaacagctatggcaaggatcaggcattatcgcaaacagttgacatcgcacacttatcctaataaaagcccgatactaactgcacataaagaggataagttaatatctggctgcgagcttttggtaaggcagatagatgcttcagtctctgacgaagaggttattaatgtgttctctagatatggtgagatttgtggatggaattttaatagacaaagtggatcctgcttcttaaagtatcgatcatatgaagctggtggccttgcaaagttcaattt

SEQ ID NO: 2018 - DNA, 392 bp, Lilium asiatic
gtcaattgcaaactctgagaattcacagttgtaaccaattgaggaaaatagagagggacgctgtaaatctgcacaaacttatctacaacggattcctgatggatttcaaatttagacaatcaacaaagttggttgaagcagatatttgcttcaattccacagggaccccacacaatctggagttttatctcaccaaactgtcaagcaatctcgctcacctacaaaaactaaccttaaaactaggtgctatttcccagatggccgatttaccaaaaggctcatgtaggttcattcatctgaggcatttggacttgcaattggatgactttaccaagatgggcctactcgatctagcaacacttatggatgctgctcccttccttgaagaactg

SEQ ID NO: 2019 - DNA, 374 bp, Lilium asiatic
gttgaaatccttaaggttaccagactccagcacaacagcaagcaaggttgtgcgaggattatttactaactcgggggtatctttgttgactcttgattcaaatgccatccatagactgtggaaatggcagcggacagaacgaagtccgtcaggcaagtctactgcatctgttgcaccacagttgtggcaaccagcaaatggaactttgatgaccaatgaagtaaatgatagcaatggtgctgaagaatcaactgcatgtatcgctttgtctaaaaacgactcatatgttatgtcagcatctggtggaaagatttccttattcaacatgatgacgtttaaggttatgacaactttcatgttgtcccctcctgccg

SEQ ID NO: 2020 - DNA, 327 bp, Lilium asiatic
  modified_base (269)..(269): a, c, g, t, unknown, or other
cgatggtagctgataatgagtcggggaagagtgtcgcgagtgaggtccggactagctccggcatgtttcttgacaagcgccaggatgagactgttggaggaattgagcgaaagattgctgcctggaccttccttccagaggaaaatggcgaggccatgcagatactacactatgagaatggtcaaaagtatgagccacattttgattattttcatgacaaagcaaaccaacaacttggtggtcatcgcattgccacggtactcatgtanccttctgatgttcagaaaggtggagaaaccgtcttcccaaattcagagggggagcttt

SEQ ID NO: 2021 - DNA, 290 bp, Lilium asiatic
cagagagctcggctctaatggcgattcctctttcagcttccttcagagccaagtctgcccggctccttcaagctttcttcgatgccaaggcttcccatctcctgagagcgacaaggacgtccacttcctcctctaccttcctcaagaagtttccactgatggcgaccttccaatcttcctccatcgtcaacctccttacctgatggcgactcctccactacggcgagcttacttcatggccaaggaagaagacgagggcgactgcagtgaagacgacatctgaagcattc

SEQ ID NO: 2022 - DNA, 401 bp, Lilium asiatic
gataaagtgcttgcacgtggggaacctgttccgttggtctatctcagcaggcgaagcgctggggcgatcgccggactctatccacccatcccgttatccgtgctccggattcatcgagctatcaaatggatacttcgcttgcactccgtggctttctttctggtaaggattctgtcgatggacttcgtcggcctctgggttttgagcaactgagaggacagaaggctgtagcacaattcccttacggatctcccttccatgcccgtgcaagcaattctctgcctggaagcagagcgattcatggtagccgcgctgtatcggactctgcgaaaggagcatttgcgaacccgcccttgtgacctcatattggcctaaagaagccggagattttggcacctact

SEQ ID NO: 2023 - DNA, 409 bp, Lilium asiatic
gtgattctgtgtcttctacatctgcttctatattgccaggaacaccaaaaaggtaggggcttgaaattgagggaagaggtttccacacaaatttgtatgatgttcgtggtatatatagtgggggaaaagaaggcaagagcaaaattcaatggcttagatcaatggtgttaagccctgatcttatcttcataccaggcgaggtggggaggatgtactattcttatgtttgttgatgtttggttcagcttcgtttcattttatacactttttagtgtggactgcctttttttagaatctgttatttgtattaatttaagctaattatctgtttagcactgtttttttttttgtgattttatatccatatattattatccatatttatttttataattaataagttttttta

SEQ ID NO: 2024 - DNA, 382 bp, Lilium asiatic
gggatcgtgagcccgtgaatgatcttggcactgtgggtcttcgtggaccgtttggcaccactggtgctttggaagctgcttacaaacaggcaactgggaagtctgtttcgctgtctgagcagcagctggtagactgtgcctacgcattcaataactttggatgcaatggtgggttgccgtcccaagccttcgaatacattaaattcaatggtggccttgataccgaagaatcgtacccctacgccggatccaatggcatctgcaatttcaaatccgacagtattggagtcaaggtcaccgtctcggttaacataaccctaggagctgaggaggagctaaagcacgcacgtgggttagtgcgtccggttagcattgcatttga

SEQ ID NO: 2025 - DNA, 258 bp, Lilium asiatic
gggaatcgttagcctaccaattgattttgtacactgagggtcttcgggttcgtttaggacctcatgtgctattggacgctaattacatacaggtcatgtggcaagtctgtttcgctagtgtgaacattatctgtacggacagtgactacccatagaatatctctgcatgctatggttcgttgccgtcccatagattggactacatttaaattaaacggaggccttgataccgaagattcttaccaatacagacgatcc

SEQ ID NO: 2026 - DNA, 363 bp, Lilium asiatic
gtcacccctgtgttggaagtcccgaggatcttgtggccacaagttctctaggtttcctcaatggtgataagccgcagacgcccaaaggcccgaaagataaatctaaaccgtctttggaaaaagaaaaaagcaggttgggcagattgaatggaactactaaagctggagtggtcgagaagaaaaagccactgctcactaagtcaaactctctgctttcaaagcatcttcataaaagcatgatggagaagaaagatattgtcggtgcgaaaccgagctctatgaactcaaaatcaatcccttcatccccaacaagttgttattcagtgcctccatcatttgagaagttcaatactggattaaaag

SEQ ID NO: 2027 - DNA, 399 bp, Lilium asiatic
cgtcgcgtgggcatcaaaaaagctattatcagaggagattgtgaagtagaactaggtagatcagaagatatataatatgatttatttgtgcttatattacaatatgatgtataactttactaatgaaactacaataaatggtatctgggataaactttaagtaatctatctccagaataatcagataagtatgatgtacttgcataaaaaattatttacctttaggttacagtcaagaaagttaataataatcttataaataaatttgagtatttatattcatattatgctagtcttggggcttaattcaaagattataagaaggcattaattaattgttaatttatttattaccaaagtgggagcttatttattgattagattgaaaatcttcaaaaa

SEQ ID NO: 2028 - DNA, 397 bp, Lilium asiatic
ccattgtataaaataccactgattgttgtgttctaagtgccgacagctttctctaggaaggcaatttgaatttcacacaaatggcttctggacaagaagcagaagtagctgctagtgaaaatgtacttgaatggccacaaaaggacaagagaagattcctacatgctgtttatcgtgtcggggatctagaccgtactattaaattttacaccgaagctttggggatgactctgttgaggaagagagacgttccagaagagaaatactcaaatgctttccttggatatgggccagaagaatctcattttgtggtagaattgacatacaactatggagtggacaaatatgatataggtaccggctttggtcattttgcaattgcttctgaagatgtata

SEQ ID NO: 2029 - DNA, 233 bp, Lilium asiatic
cccatactctaaattaccaattattcttgtaaccttacttccgacatgtttgtgaagtaattcatttagaatattacacaatatgccatcttgttcaataatcaaaaatacctcttaatgaaaatgttctcatatgttcacataatgacaagaaaagattccttcatactttttatcatattcttagatctataaccttatctatcttaatttttcaaccttaatctactttt

SEQ ID NO: 2030 - DNA, 291 bp, Lilium asiatic
aggcacccactggcggcccactcccggtaccggcgaagcgccctcgccccgactaccccgaggttggcggcttggattattatggctattatcctcgcccggaagaaaggatggggcatcttccgccaagagatgcggggcatcttccacctagagatgtggggcatcttccaccaagagatactgaatatgatcgttactacatcaaaggggtgtctgattttttagaatctgcaaggcctgtgtccggaggattaacatcgcatcctggattcattggtggagctccgg

SEQ ID NO: 2031 - DNA, 347 bp, Lilium asiatic
  modified_base (14)..(14): a, c, g, t, unknown, or other
  modified_base (72)..(72): a, c, g, t, unknown, or other
  modified_base (83)..(83): a, c, g, t, unknown, or other
tccggttggttttncggctcggcccagcgtccgttcacatctagggtttccaaagagattctttttgaaggngggaggacggngctcaggacggttctgtgccgttttagtggctccaatatataccctgtcaagggtattagattcgttcgagcggactcgcatgttttcctcttttccaactccaattgcaagcggtactttcacaaccgtctgaagccagcaaagctctcttgtacggcatttttcatgaagcagcacaaataggttatacatgctgaagctgccaataagaggcgttgtgccaccaattagccatatttctatgtccattgtcggtgccactt

SEQ ID NO: 2032 - DNA, 216 bp, Lilium asiatic
aaaaaaaaaaaatataataaaaaaataaaattcaaaataaaaaataaaaaatataaaaaaaaaaaaataataaaaataaataataataatcaaaaaaatatatataacaaaaaataacaaataaagatataaagataaactactaaaaaaaacaaaaaaaaaaaaaaaaaaaaaaatgaaaaataaaaaagaaaaataaaaaaacataataataat

SEQ ID NO: 2033 - DNA, 143 bp, Lilium asiatic
tcggagatgcaccaacttaaaagtttgttttctaagacgacttcctaaaagcttgtgagggccttttttgaaccaataaaaaaatctcactcttatattgatttcaagatatatcttaaacgagaggtgttcataaagactga

SEQ ID NO: 2034 - DNA, 344 bp, Lilium asiatic
cctatactggagattctgctttatacttgtaccttttgggccttttcgccagtgagctagcatatatgcaattctcattcttcctattttgtggatatattggagtctctcttctcagcgctgttatccataacccttgtatatggacgggcacggtctttgcgaccttctactttagcactatcattgcggatgcttgcttgcagatcatattggtaggttgagagtgtgagcacatatgcacacacacgtcatgtatgatctagaatcaattatacttatttcatacatttttaatatctagtctttccctttttttctctttcatgtctatatttttactt

SEQ ID NO: 2035 - DNA, 252 bp, Lilium asiatic
ctcctttccagaaaaactttttcttctctttctcatcatctttctctgcaaggccagcacgatctatgccagagagagccacttcttcagtaagactctgcggaaccatcctccataagctgccatccaagaatcaactgcaacatcaatggagtacccccaacaaaggaaaaatggatacggcctctattgccgttaccctgatcaacttcagccaaccaccaccaccaccagttacagctactatgtaac

SEQ ID NO: 2036 - DNA, 282 bp, Lilium asiatic
tttttgggggaatccggaaaaaaaaaaaacaaatccacattctccaatattaaagatttttttaaaagaaaaggttaattgacttgtgaaatatcttttcctaaaccttgaaaatgatttattttaagtgatgtttttggttcccctgtaccaccttattaattaatcccctataaattttttttgcttaaacaatgttttacatgctatttctaacccatatataaaagtatgctctatcctactattttgaaaaacctcgctttatatataaaattaata

SEQ ID NO: 2037 - DNA, 357 bp, Lilium asiatic
gctcgcccacgcgtccgttcaatctctgtattctctcaccttcattacgagcttttgctgggtgggaagggggctgcagtcttctgcaagtttgcatggatgcaatggatgtggatgtatcctgacttgctgaggtgagcactgcctctaccactatatcatggtgtttgctcctgctaagggggagtttgagggtttgagatgtatgctgagaatggtggctgttgctgcatgtgtggagatatctgcaactgctacccctgcaagtgttgcaagtgagcttcttcattgagaggaggatgttggcttttgatacccctttgttttactatgttttcttgttgttatgcttgaatt

SEQ ID NO: 2038 - DNA, 151 bp, Lilium asiatic
gcaatgcaaacattgatatgttcaatgggtttatgaggctcattgatgacaagtgggggcgtgtaaagttcactgacactcctccctttacagtaaacaaggctagcagactatgccttggggcgtatctaataatcacttgtattacaat

SEQ ID NO: 2039 - DNA, 353 bp, Lilium asiatic
  modified_base (35)..(35): a, c, g, t, unknown, or other
acaagcatacattcaaacgtttattatattataangtcatgatcctaatcgagcgttaatttaaagggccatacgtctaatacttaaacaatacaagtatattaagccttttgcctatcatataacacatacattcaaattagtttttatacccttttttgattataatattgttactttatttttcttatttttttttttaaatataccttttttaaaattccatattattttatacaaaattttttaaaaattttttttttattataaatattttttattcttttattaatttttttttttaaatattattccatcaccttttttatttttattttcctttttatttatat

SEQ ID NO: 2040 - DNA, 382 bp, Lilium asiatic
gggcgaccgacgcgtacgccaattgaaaactttgagaattaatagatgtaaccaactgaggaaaatagacaggaacggtgtaaatttccacaaacttatctacaactgattcctgatggatttcaaatttagacaatgaacaaacatagttgacgcacatatttgctttaattacacagggaccccacacaatctggagttttattttaccaaactgtcaagcaaactggctcacctacaaaaactaaccttaaaactaggtgctatttgccacatagccgatttaccaaaaggatgatgtaggttcattcatctgtggcatttggacttgcacaaggctgactttaccaagatgggcctactcgatctagcaacacttatg

SEQ ID NO: 2041 - DNA, 380 bp, Lilium asiatic
cggacgcgtgggcaggaagagggatcctcactgcctcagttgatcgacgatgatatggctcctttgatggattttggtatcaccacagggacaaccattctggtggacgaagagagctagtttcagagggtgcctgtcgggtatcattctctgttgtgctctttctgtgatgatgagaatgcagtggatgtagtgaatctgttgattatacttatcttatatagaggtcgttctcgggaattttaatcattttgttgctgggattctactgcctcgactgatccatgatgatatggctcattatatggacgatgggattatcacatgtgcatggggttggtgaatttatgcctttaaaggaaccttatttttaagaactg

SEQ ID NO: 2042 - DNA, 188 bp, Lilium asiatic
ccatcctcaattctctcagatctctctctaatggcgcccaaggccgagaagaagccgtcggcggagaagaagccggccgtctaggaggagaagaaggcggttccggcggagaagaagcctgctgagaagaagccgagggccgggtagaaggtcccggtcttcaaggagggggcctttgtcttgatgaa

SEQ ID NO: 2043 - DNA, 398 bp, Lilium asiatic
ggcggcggcacgaaggatcgcttcattcctccttgcccgcaccctctcgaaagggagagtggcggctccagtgtcacggattcaaggatttgcaactgctgcggcagcggtcgaagagccgatcgtgcctcctgttcaagtgatctacaatcaacttctgatcaatgggaattttgtcgattcggcatcggggaagacatttccgacattggaccctaggactggggaagtgattgcgcatgttgcggaaggggatgctgaagatatcaaccgagcggttgccgctgctcgcaaggcgtttgatgagggaccgtggccgaggatgtccgcatatgagagatcgcgcattcttaaccgattcgcggatctcattgaataacacaatgatgagattgctg

SEQ ID NO: 2044 - DNA, 290 bp, Lilium asiatic
cccacgcgtccggacaaccggtttcgtcatgggtaaggtgcacggatccttggccggagcgggaaaggtgaggggccagacgcccaaggtcgcgaagcaggacaagaagaagaagccgaggggccgagctcataagcgcatgcagtacaatcgccgcttcgtaaccgctgtcgttggattcggaaagaagcggggcccgaactcgtccgagaagtagagattgaggcctggaaccgtgatttcaagattctcgtctttaggtttttggtttaaatttttatggaggctgc

SEQ ID NO: 2045 - DNA, 338 bp, Lilium asiatic
ctcagaagctgctatcttttaatgaacacatttcagaattgcttcattttagaaaagggggttcggatctagaaacagaaaacaatagtttgcagcagcttctgacacagtctgaagaaacccaaggaaaattaagagagcaacatgaggctgaagttactgattttatgtcacagctggagaagaaagttcaggagctgctatcttttgatgaactaaatgccgaattacttcgtattagggaaagagtttcggatctgcaaacagaaaacaatagtttgcaacatcttctgtcacagtctgaagaaggttatgaaaatctaatagagcaacacgag

SEQ ID NO: 2046 - DNA, 196 bp, Lilium asiatic
  modified_base (6)..(6): a, c, g, t, unknown, or other
cgaacncaaacatttaaatccatatttctatttaaacccaaatcgatgacacgtcgcatggtgttatttaaactggcgcttataacttttcaataaacgattgtaacaaactttagatactttcttatcatcttgaacacaatgattaattttacttcctattaataaaagttcttagtaaagaccattttggctt

SEQ ID NO: 2047 - DNA, 379 bp, Lilium asiatic
aaccgaaagcacaccggagcggcgagcggacaacgacggcagcaggctaagatgggcgaggctggaatcgagcagtctccgatcatacccccagtccaattcccgtatatgaatccctaccaagccaaccaaatgatgagcaccgcaccagcataccaggcacaacagctcgctcaagaacaactttcttaccaacagaagcaacaccacctagacgagcaactcaagatgttccaaactatccaaaagcaggagatcatggcgatcaaagatttcaagaaccacagcctccctctcgcccgaatcaagaagataatgaaggcagacgaggatgtgaagatgatcgcagcagaggcaccactcctctttttcagagcat

SEQ ID NO: 2048 - DNA, 258 bp, Lilium asiatic
cgcgtacgcaaatccctctttctctctttttcatttaatatcttcaatggctcccaaggctgacggagggtcgtttgcttataagaagccctcctaggaggagaagaagttcgtccctgctgagaagaagcctgccgagaagaatcccaaggcagggaagaaggtcccggccttcaaggagggtgcttctgacatgaataagaagaggtctaataagtcagtggagacctacaagatctacatcttttaaggtgctta

SEQ ID NO: 2049 - DNA, 439 bp, Lilium asiatic
gggagagggaggggagtgtattactttttgcagggtgattattaccgttaggtgggtgagtttaataatgaacatgaaattaaataatcttctcatcattctattaaagcttattattcttcttccaacacattcaacactgatctttcctctacttatcctattttactcattcttgctctcaattttttaatcttctattatgaaattattaattcttcttatatgtctttcctttttatttttcattcctttttttgtttcattttataatattttgttctccttttatttcttgtattctttacttactactagtttctttctttatttttttatttttcttatattttctttatatctactttttttacttttctatctttatctttttctttatttttattaattatttttattatttttattttttttttta

SEQ ID NO: 2050 - DNA, 331 bp, Lilium asiatic
atcttcttgtcactaaccccatctatttttgcgaaggcaatcaaggaaaagacctggggtgcccttctcttgaaggtcaaccatatttggtctgttactgatatcattatatcttttaaatattttatatttgctttctttttgattttttttcttttcttctttttttttaataattttatattatatcttttttttgtttaaatattatttttcttttattataattttttattaatatatttgtttaaataattattcttcttgttttttttattttctttaactcatattatggattttttcgattatatttatttttatcttctat

SEQ ID NO: 2051 - DNA, 197 bp, Lilium asiatic
atcttattgtcactaacccctctagttttgcgaaggcaatcaaggaaaaggccttgaatgcccttctcttgaaggtcaaccacattgggtctgttactgagagcattgaggctgttaaaatgtccaagcaagctggctggtgtgtaatgactagccaccgaagtggtgtaactgaggataccttcattgctgatctt

SEQ ID NO: 2052 - DNA, 227 bp, Lilium asiatic
atctgctgaacactaacccgacgaatttttttttttctataccccaaaaaaccgggaaggggcgacaccagaggggcggccacaaagaatctcaaactgtgatcaatgggtcaaaaaacacgtccaaccaagcccactggcgagcaacaactaacctccgaagaagagaaactctgtacacctgcaatgataaaataccaaacccccagtcaacccacaatatcaag

SEQ ID NO: 2053 - DNA, 339 bp, Lilium asiatic
agtgaaccatgtggactcttgaggttcgcaatgcgaatatagcaaacaatttctgggttggttcaattaatcggcttggaactgaagtctttcctaatgctctcacttctggcgatggcaagccccaacatgccgattttggacatttttatggttcgagccatttttcaactccgcatgcatcttgcacaccatccctttcacgccacagggatggtttaatggttgccgatatggatctcaacctctgtaggcaagtgaaggacaaatggggtttcagaatgactgcccgttatgaactatatgccgaattgctttctgagtacttgaaaccagatt

SEQ ID NO: 2054 - DNA, 308 bp, Lilium asiatic
tgatcttggaataacaggtcctgagttgcattctctttcaaggccaccagtgttggaagctgaagctactgcaagagcgatacgtttggctagctttgttaacacaccgttatacgtggttcacgtcatgagcagtgatgccatggaagaaattgccaaggctaaaatatcaggccaaagggttattggggaacctgtagtttctgctttgatacttgaggattcatggctttggcataccgacttcactacagccttaaagtatgtaatgagcccctctataagaaaatctgggcatcagaaagttc

SEQ ID NO: 2055 - DNA, 347 bp, Lilium asiatic
aaaagattctggcctctcggcggttaggacttccgagaatactcaattcaagcgaggaagcatccgtctcgaaaccatcgtcctcaattgcaatcttaatccggcggtaatgacagacaactcgcaggagatggagatcgatgctcttctcaaggacagcatcaaagagatggattccttgggtagcgggctcggcactactgatcggagtttcgaagtttggatctcctctcagggttaccaaggaagttgtggttgtgatgccagcgaggccgaaaaggagctcgacttggcttttgctaagctaactcttgctagatctcttgaagaaacagattgggaaaatg

SEQ ID NO: 2056 - DNA, 220 bp, Lilium asiatic
ggcgctgaaagtgtacgccgatcgcttgtctcagccctcccgtgctgtgatcatcggttgcaaggtgaatggcatcgaatttgaagaggtgaggctcgacattatcaagaaggagcacaaatgcaaagaagttacagatgtaaacccgaatggacaactttcggtgattgctcacggaacatttacactatttgaaaggcatgccactttgaggtacctt

SEQ ID NO: 2057 - DNA, 404 bp, Lilium asiatic
gcagcagattgagtatcaagaggaaatccgatgaacatactactgcgcttaaaggtttctcaccagatgttgaagacctccctttgcaaacccttataaagcaacacaaaaccctggagatgattgatggcaacggatcgagtgttcatggtgaatttgagaaaatacacaagttctcaaacgctgatgcgatcaacagcaaccgattgagtatcaaaggcgaattcaaagagaagctcctggatgttcatgggaccaaagagaagctcctggatgttcatgggaccaccaagcctttggttgctgaagtgatcagcaccagcagattgagtatcaagagcaaatataaaccgaagctcctgaatttgagtaccaaaaccgaatctgctaagcaacacaggccc

SEQ ID NO: 2058 - DNA, 271 bp, Lilium asiatic
  modified_base (19)..(19): a, c, g, t, unknown, or other
  modified_base (48)..(48): a, c, g, t, unknown, or other
  modified_base (88)..(89): a, c, g, t, unknown, or other
  modified_base (103)..(103): a, c, g, t, unknown, or other
  modified_base (106)..(106): a, c, g, t, unknown, or other
ggggggacgctctctcctnctccccaaatccttttaagattttatagngagaaaatggccgggaaatgttgcaaggttctgagcgccnncaacaccaccttcnccnccaaggacaatgacaagaatcgccccacctcccgctcctaccgcgctgggctccagtttccggtggggaggatccacaagcagatgaagtcgcggatcgcggctaacagccgcgtatgttctacggctgttgtttactcttcggcgattctgtattatcttactt

SEQ ID NO: 2059 - DNA, 314 bp, Lilium asiatic
atccacatggtcacaaaacaattaatgagtatgttcgggaatgtaatatatgccgtggaagctatggcaaagtccttttgtaccggagtaatgctgattgaaagcaatatgcaatcaaagcattctataagtctcgtctggctaaagttcgagttacatcttcagaaactgctatgacacatgttcgcatggaggtttcaattatgaagattctggaacatcgtaacataataaatcttaaagaagtgattgatgaccccgagtctgaccatttttatatggttctaaaatatgtggatggcaagtggattttt

SEQ ID NO: 2060 - DNA, 386 bp, Lilium asiatic
cgtccggacgatactagttccgttcattaggtttctctgatgcttgttcgcccagcgaacaacagtacatagagtgactgttgccattcaaaaggttcctccctcctacaatttcaaaattcttgaaggtgtgctcattcaccaacttaaacagttcgttattgatgatcataaagttatacttagtgtctcaaatcctgagacacgactcgatgatgctgaattcgacgaaaatgaagtatatgccattgatatactcactatcacacgtgaaggaaatccaaaactgttggatgagaagctaactacaatttataagagagcacttgataaaaattatcatctaaagatgaatgcgtcaaggtttatatttatttaaataagcc

SEQ ID NO: 2061 - DNA, 388 bp, Lilium asiatic
  modified_base (363)..(363): a, c, g, t, unknown, or other
  modified_base (372)..(372): a, c, g, t, unknown, or other
gtttcctcttatttccacatggtatgagagagaccagtaatgggttaggttttcggcaacggcgtcactcgaaattgtaaccttcttgctgaagagaatctctcattgagtttgttagttgtctctcctctttgtcttcaactttgaatctaaggtttcaacaccctacatctatggattatgatggatgtttgcttagattgagggtttcttaatatcgaactctcactgttccaagccatacttgaacttcggcatcaagtttgggcactgatacgagtgttttgaattagcagttatccttcctatcttgagtttcaaatctgcagtccatcccctcttgtattgctctcaacttcaggnttacttgtncaccgtttgtactttc

SEQ ID NO: 2062 - DNA, 133 bp, Lilium asiatic
gcagtaccttgacgagaataccatcttccatctcaacccgtctggccgctttgtgattggagggccgcatggtgatgctgggcttaccggacgcaagattatcatcgatacctatggtggatggggagctcac

SEQ ID NO: 2063 - DNA, 241 bp, Lilium asiatic
aattatcggtcgaccacgcgtccgccgatttattgtctaagattccatcaccatctttacttcgactatccgttatataactagcgagcgcgagtaattatgatgtcctcaccagacactacaccatcaaccttcacaaacgcctatacggatgcaccttcaagaagatggctcccaaggccatcaacgacattagaaaatcttcccagaacgcactttggactactgatttgaaagatca

SEQ ID NO: 2064 - DNA, 433 bp, Lilium asiatic
tgtaaagccacgtgcaacccgttgggccttttgttgctccacatattcatcagggcgatagttgaccttgtaaacccatgtgttgcccacaagtgtcacacctgggggactacgaacgtctcttaaatgtatttcagaaagctcgaagctcctttgtcatgttttgttgccacttaacactctgaattacctcctggtaccatcagggctcctgtatgttgtgcactgcagaaagaaatgctcgaaaaataagtgtataagaagcaactatcgtgaagctaaagtgattcgtctagcgatgaatgtgctaggagcgatgtggaattgcatgatctggcagagcatgtgtcagacctggggagtaggaacaactgatatgtgtgtttgtaagaaagctcatttgtcatgttctggcgcaactcagcaccataat

SEQ ID NO: 2065 - DNA, 365 bp, Lilium asiatic
  modified_base (22)..(22): a, c, g, t, unknown, or other
gggccgaccgcacgcgtacttntaaatccactttcaacctctttttcctttttttactccacatattcatcaggtgcgtacgttgaccttttaaacccatgtgtgccccacaattttcacacctgtgggactactaacgtctcttaaatgtatttcaaaaagctcgaagctcctttgtcatgttatgtatccacttaacactctgaattacctcctggtaccatcatgtctcctgtatcttgagcactgcataaagaaatgctccaaaaataagtgtataataagcaactatctagaacctaaagttattcgtctagctatcaatgtgctaggagcgatgtagaattgcatcacctggcatatca

SEQ ID NO: 2066 - DNA, 419 bp, Lilium asiatic
caaagtgggtatggggtggcgcggaacgagctaaaggcaaagacctggattgcaaaagcttgtaggtatcgctcctctgcttggaaggtttgtgacaagcgcccaggctataatgctagtgactcggactcagaggaggttaatgaagattcaaagtgatgactagatgcgacttcagtacaatagaaggatgacatatatctgtgcgcatatcgtagcggtttcctcttgtggatgttatttcacttcactgttttttttaattgggggagggtggagcgatgtttattattaatataccatcttattagttgactctttgatgtcttattaattgccctcaaatgttttatgaacttgattcactccgtttcatgggcaaggaatttcgctcgtgcatttttttatgacacttaaat

SEQ ID NO: 2067 - DNA, 404 bp, Lilium asiatic
acccacgcgtccgatctctctctcctccgcccccaaatccttcaaaggaatctagagtgagaaaatggcctgtaaaggcggcaagggactgatcgccggcaagaccacctccgccgccaaggacaaggacaagaagcgccccacctcccgctcctcccgcgctgggctccagtttccggtggggaggatccacaggcagttgaagtcgcggatcgcggctaacggccgcgtatgtgcgacagcggcggtgtactcagcggcgattctggagtatctgacggctgacgtgctggagctggcggtgaacgcgagcaaagatctaaacgtgaagcgcataacgccaaggcatctgcagctggcgatccgtggggatgaggagctggatacgctgatcaaggggacta

SEQ ID NO: 2068 - DNA, 445 bp, Lilium asiatic
agatcaaggaaattgagatggaggatcaagagatggagcagcaggaggataaagtgttggggcctgttcgggacattgatagcgctgatttggatgatccattggcggttgttgagtatgtggagcaaatctatgactttttcagaaaaactgagattgcaggctgtgtaagccctgattacatgtcccatcagtttgacatcaacgaacggatgcgagcgattcttgttgactggctgatagaggtgcactacaaatttgaacttctggaggagacactatatctcactgtcaacatcatcgacagattcctcgcgaatcagagtgtggtcaggaagaagctccagttggtcggggtgacttgcctgcttcttgcttgcaagtatgaggaagtttcggtgcccgttgtggaggatctgatactgatttccgacagagcttacac

SEQ ID NO: 2069 - DNA, 314 bp, Lilium asiatic
cgtacgaaaaaacttaatgcttttcaaaaacccttttctaatttttagtctttcactcaaatctggacattttgaacatttaatcatcacaattttcttcaattgttcaattattaaattgaaggaagtatactctttattgactataaatttgcaaccattgactctcttcaagacattttacatgttaaaaaactagttcaacgtgcgcaacctgatcctttactttacattatacaacatgtgataatttcaattgatgcaacaaatgaactaaagtatcttcactagaatgatcaaccttctataataca

SEQ ID NO: 2070 - DNA, 427 bp, Lilium asiatic
gagcaaatgcaacaagtcatgaaggacataagggaattcaaggagaagactaaggtcgaggaggtgggggttctctggaccgcaaacaccgaaaggtatagtgatgtcatcgtcgggctcaatgacactatggagaatcttttcgcctcactagacaagaatgaatcagaaatatctccatcaactctctttgccatcgcttgtgttctcgagaacgtgcctttcatcaacggaagcccgcagaacacattcgtccctggactgattgaacttgccatcaagcagaacagtcttataggcggagatgacttcaagagtggccagacaaagatgaagtctgtcttggttgatttccttgtgggcgcaggaatcaagccaacatcaatagttagctacaaccatcttgggaacaatgacgggatgaatc

SEQ ID NO: 2071 - DNA, 399 bp, Lilium asiatic
ctgacgcttggtgggcccttttcgtaatacatttcattctggagggactggttacttgacggcttggtttgcaatgatggttggaccacaagggcgtgccattggtgtggagcacattccagaacttgttgcttcttccattgaaagtattaatagaagtgcagcttcttcattactgaaagatggttccatctcagtgcatgtatgagatggaaggctcggttggccagcatttgcaccctatgatgccattcatgttggtgcagcagcggatgaaatccctcacactctaatcgagcaattgaagcctggtggcaggatggtcatccctgtgggcaacatcttccatgacttgctagtcgttgacaagaagtcggatggctccctgagtgttcgagc

SEQ ID NO: 2072 - DNA, 441 bp, Lilium asiatic
gtttgtgggaaaacaatggtaacataagactgctatttagggtttttgtgctcggtcttgggcgaaaagagtggatggaagtgaattgcttggatggaaatatgctattcttgtccaacaactgctctagatcctacaaggttgatcagaattcatcgtcaggtggttattctgggggtcacatctactacattcgtaatggcatatacgatgtctactctttaaagaagtggagcgcttcactggtacctcaaagtgtgaggctttgtaatacgagagcagagccttgctggtttgtgctaaattaatgtttgaataagagatcgatctaccgcattgctggtttgtgataaattaatgtttgaataagagatcgatctaccccttctatgtagtgtttttcagagagattctgtgtcttatttatgatcattagctaac

SEQ ID NO: 2073 - DNA, 390 bp, Lilium asiatic
ttatgtattaacaccacagattcacatatattttattaaaaggagttataaatgggggtgagctacatattaatataggaaaccaaagacaagatgaacactttctattcatatccatacaacactctaaacactccaacgttaaacataattcatacataaccggttattatagggatcacatctactacattcttaatgtcatatacgatgtctactctttaaagaagtagatcgcttcactggtaccttaaattgtgaggctttataatacgagatcacaacctctctcctttttgctaaattaatgtttgaataaaagatcaatctaccgcattactggtttgtgataaattaattttttaataagacatcgatctacccctttta

SEQ ID NO: 2074 - DNA, 256 bp, Lilium asiatic
  modified_base (31)..(31): a, c, g, t, unknown, or other
  modified_base (43)..(43): a, c, g, t, unknown, or other
attaacacaacatatatttaaaatttataanaaaaccacttanactaagcccaagacgactattaaatataccaaaccactcccattattaaccctttctattcatatccatacaacactataaatcccacaacgttaaacataattcatacacaactaaatatccattacaacacatcaactaaattcttaattacatatacaatctctactctataaaaaattatttcaattcaatcctaccttaaaccatcat

SEQ ID NO: 2075 - DNA, 439 bp, Lilium asiatic
gtgattccgaatgagatcgaggagttcctgtatgagttgtgcgatactgatgggggtggcgtggttgtgaggtctgatctggaaactgttttaacgtcaatacacagtgctctcttttcttcggaaaaagctgaacctggcttgagcacacatcctgatattatgaatgtatttttaaatgctgcaacattttcgaaagaagttgaaggggattcagagaaaatcatgtctttacgggattttagaagttggtgcaaccttttgccatctgtaagaaaatttcttggaagtttggtcatgccgcctgattcatgcagaccgggttttcaagttccttgtctacatcacccagaaaatttgaattcagaaatattaattctgaggaatgaatatgcttggcacatcggaggggctctttctcaccatgagttggaggact

SEQ ID NO: 2076 - DNA, 427 bp, Lilium asiatic
aaaaaacttgatgcttctcaagagcccgaaactagtaatgagtttttgactcaggtcggaacggtgtcaagattgaagcatgacaattttgttgaattgttggggtattgtgtggaagggagtatacggtgtatggcctatgagtttgcaaccatgggctcgcttcatgacgttttacatggtagaaaaggagttcaaggtgcgcaacctggtcctgtacttgactggatgcaacgtgtgagaattgcaattgatgcagcaaaggggctggagtatcttcacgagaaggttcaaccttctataatacaccgggatatcagatcgagcaatattctcttgtttgaggacttcaaagcaaaaattgcagacttcaatctttcgaatcaagcccctgacatggctgctcgtctacattctactcgtgtgc

SEQ ID NO: 2077 - DNA, 402 bp, Lilium asiatic
tgagccctaatctctcctgctcgaagtgatcgattaccgatcggcttcgcgaaaccctaggacggagggctcggaagaatcgatcattacttttctgttcgaagccctacatccgatggcatccaagccgcttacgttcgaggcggtccctctgattgagaagaagatggacatgactctagatgaaattatcaagatgtcgaagaagactacacaacctaaagggaaaaaacctcagagacaaccaaataaaaaccaacgggtcctgactgacaatgtgtctaagcgcaatgcaaaagtgcagggtttcatggattccacatccttcatcagacagggtgtgcttgctcaaaggaggactaactttcgcggtaaccagttccaagctacaaaagaatatgc

SEQ ID NO: 2078 - DNA, 425 bp, Lilium asiatic
gaccacgcgtccggagaaattggtaatggacttggatagaaaagttagactcggccgtgagcgtataacacgagaggtggatgtgccgcctcccctattctttactgagaaatccgagcagctgtcaatgcttgaagagaaaataaagaaactgttggagcaagttgagacactacgtgaagttggcaaggtggatgaagctgaggcattgatgaaaaaggtagatatgttgaattttcagaagacagcattgactttacaaacatcaaacgataaagcaatgctgcttagtcaggagaaaaaaatggcactgtgtgagatatgtggctcttttttggtagcaaatgatgttgcggaaaggacccagtctcatgtaaccggaaagcaacatattggctatggtctggtccgcgattatatcgctg

SEQ ID NO: 2079 - DNA, 390 bp, Lilium asiatic
gacacaatcaaaattcacaaagatagatttcatatatccagcctgaagctattaacacgtaatttggcttccacgctcccctattccaaactaacaaatccaagcagatgtcaatacttgaagagaaaataaataaactgttataccacgttgagacactaggtgaacttagcaaggtgcatgaagctgacgcattcatgaaaaacgtagatatcttaaattttcagaagacagcattgactttacaaacatcaaacgataaagcaatgctgcttagtcaggagaaaaaaatggcactgtgtgagatatgtggctcttttttggtagcaaatgatgttgctgaaaggacccagtctcatgtaaccggaaagcaacatattggctatggtc

SEQ ID NO: 2080 - DNA, 367 bp, Lilium asiatic
  modified_base (18)..(18): a, c, g, t, unknown, or other
  modified_base (44)..(44): a, c, g, t, unknown, or other
  modified_base (46)..(46): a, c, g, t, unknown, or other
  modified_base (73)..(73): a, c, g, t, unknown, or other
  modified_base (97)..(97): a, c, g, t, unknown, or other
  modified_base (100)..(100): a, c, g, t, unknown, or other
cctaatctctccttctcnaattcatctattacttttcgccttcncnaaaccctaaggcggaggtctcatttanaatccaccattacctttctcttcnaanccctacatccgatttcatccaatccgcttacattctattccgtccctcttatttagaagaatattgacattactctacatgaaattatcaacatgtcgaacaacactacacaacctaaatttaaaaaacctcatatacaaccaaataaaaaccaactcttccttactgacaatttttctaatctcaattcaaaagttcagagtttcatggattccacatccttcatcatacattgttttcttcctcaaaggaaaactaactttctct

SEQ ID NO: 2081 - DNA, 181 bp, Lilium asiatic
ttctaatccctatatcctataccatacaatcaacttacttcctatgccttccatcttaacgacaaaaatatgatctactcactagatgcaatcccatcattcatctaacactacacaacctaaacgcaaaaaaccttatacacaaccaaactacaaccaaaacatcctgactctcaatatc

SEQ ID NO: 2082 - DNA, 434 bp, Lilium asiatic
ggcttctgtcagcgaaaaatatggtggagaactgcagctttctgtcatcaatgatagtatgccatagcaaatgcatctatgcagagaaatatgaggaagttagataccaaatgaagtgatctttattgcgtgggagatttattatttgtgctgcatttggttgcaaacatagcaaagaaaagaaacaaataaacctggaggagtgaagttggattggaatttctctcatgctgggtttgtgcagtggattcctgtaggtttggaccacggtcagatcagtgaagtgtgtgtgcttgtgctttctgctttaccatacaaggcaaagtgcatcttgtaatatggttatgctaataaaatccccccaaatggacagtccaatggtcaagaagtgtgtggttgtgcctatacttgattagtattatacatacgggaga

SEQ ID NO: 2083 - DNA, 439 bp, Lilium asiatic
cgccgccggcagccgcttccagatccgccacaatgactgctcaaacccaggaggagctccgcgctgccgctcttgagcagcagaagatcgatccggatgagcctgtggttgaagacgaggatgacgatgatgaggatgacgaagaagatgacgacaaagatgaggatgatgcagaaggaggtgatggcagtggaaggtcaaagcagagcagaagtgagaagaagagtcggaaggcaatgttgaaacttggaatgaaacccatactcggtgtcagccgtgtcacagtaaagaagagcaaaaatatactgtttgtcatttcgaaaccggatgttttcaagagcccgaattcagacacatatgttgtctttggtgaggctaagatagaagatctgagctctcagctgcagacgcatgctgcggagcagttcatggcccctga

SEQ ID NO: 2084 - DNA, 279 bp, Lilium asiatic
tcacctccaaagtctgttacatatccaacttaatgactcgcaaaaccctggctggggttagcggttatgttaacactcacgacatcatccatcatgattaactttttgctaacgacgataatgacgatgatacctatctataagatcatgacgacaaaaatcaggatatactcacattgatgctatggccatcataaagtctatcagatcaaaactcaaaagatacattctatgtgattgcactaactacaattgtaacatatactatctgtaaagcaa

SEQ ID NO: 2085 - DNA, 442 bp, Lilium asiatic
ctgacgcgtgggcgaagcacaggctgcgagtgattctgaaactgatttgatgaccgagcggagggaggctgaaactgagatgaagactaaattgagacaagccgagtctggcgtggccgatgcaaatgcagtggcagaagctgcaaaggctgagactctgaagttgaaggaaagactactggacaaggaaaatgagctgcagagtatcagtcaagagaacgatgacctccatgctggagaagcctccaatttagagaaaatcagagaattatctatgttgcttgctgaggccaccgccaagcgaggtggtgaaaatggcgaccacagcgactatgagtatgatatgctgtccaacagtaaggattttcatagtgacgactttgagactaaaaaatccgtgcccgatgaattaaagccaaaggagaacgtaaacgggaacaaa

SEQ ID NO: 2086 - DNA, 205 bp, Lilium asiatic
  modified_base (20)..(20): a, c, g, t, unknown, or other
  modified_base (35)..(35): a, c, g, t, unknown, or other
  modified_base (41)..(41): a, c, g, t, unknown, or other
  modified_base (70)..(70): a, c, g, t, unknown, or other
gggggagggaggcgtgcggngcaaatgagcaagangcggcnactgttctcatctttactaaactctgcantgtacggaagctttgctaattattacataccttatctcctccctgctcttctgcaaaccaccaacttcgaaaaccaaaacccaaaacttccaaccaaagttccgctccaaatttacattgcacttattattttct

SEQ ID NO: 2087 - DNA, 442 bp, Lilium asiatic
atccgagagaggagagagcatcaatggtgcatcgcctgacctaccggaagcgccacagctgggccagcaagtcgaatcagacgagggtcgtcaagaccccacgtgggaagctggtgtaccagaacactaacaagagggctagcggaccgaagtgtccggtgactgggaagaggattcaggggattcctcacctgaggcctactcagtacaagaggtctaggttggctaggaatcggaggactgtgaatcgtgcttatggaggggtgctctctggcagtgctgtgagggaaaggattattcgtgcctttcttcttgaggagcagaagattgtgaagaaagtcttgaagatccagaagactaaagagaagaccaccaaaacttacgtatgggagttgaatttgaatgtttatttttttctagctcaagagggattttttgactg

SEQ ID NO: 2088 - DNA, 435 bp, Lilium asiatic
cgagcacgcgtccgagaaaatccatcaggtagttgagggatgtatggttcctcagaatccattttgaccggagcctaatgacaaggcgacccaacagagaattaaaattgaggctgaatgaggagaaattggaaaaattatttaattaaaagcattgagaaggaagataatacctcgtccgcggttgaaatcaagtaatttcttgcgatcggaagtgacaccagcagcgaagggcgaaactagggttgcgcgggaaaagaatgggtttggagggaaatagagttgaaggtttgacccaaaaccccgggttaggatccgactaaatgcatcacgaagcgtgagccggctaaggtgttccaatgggcgagtagaagtccaagagttaaagtgaatggctctgttttaactaaaaggtaaaggcctcattgataccat

SEQ ID NO: 2089 - DNA, 361 bp, Lilium asiatic
gtactctggaaatttttgcaagcacattccatccgatatcgatcttcctgcgattgacttgtataagacaataatggtgactttcaagcatgatgataaattccaggagggctccgaatgttcatttcagtgtgcccttctatacactactgtatatggtcaaagacgaattcgagttctgaatctatcacttccatgcacaagcatgctaagcagtctgtttcgtactgctgacttggatactcagtttgcctgctttttgaaacaagctgcaagtggcattcttacaagtcctctttctcaagttcgggagcaaactacaaatctttgcataaatattctgcactcttaccgcaagttt

SEQ ID NO: 2090 - DNA, 432 bp, Lilium asiatic
gggagatgatgtgggcagctgattttgatgtagatgttgttgcggaattagaagaaaactggcttgagcagttggttatacagtttcagagaaatttgagcactgaaaaaataacagaaatctcggaaaatggtaaaaggaattttaaaaactcactctctcataacggaaatgaatcttatcgcaatggggtgagatctacttcaggtcaccccttatgtggcttgacaagggctaatttctggtcaagaaatgatcagctgcagccatgctcaacagctgcgacaaggaatggggatgatgaattgcctgtcttcattgtagcagcaattctgattatcaatcgccaaaagatatttagagaagcccattcaatggatgatgtaatcaagatatttaatgataatatgctgaaatcaatgtgaaaagatg

SEQ ID NO: 2091 - DNA, 440 bp, Lilium asiatic
cgcctccggcagccgcttttagatccgccttatgactgctcaaacccaggaggagctccgcgctgcctctcttgagcagcagaacatcgatccggatgagcctgtggttgaagacgaggatgacgatgatgaggatgacgaagaagatgacgacaaagatgaggatgatgcagaaggaggtgatggcagtggaaggtcaaagcagagcagaagtgagaagaagagtcggaaggcaatgttgaaacttggaatgaaacccatactcggtgtcagccgtgtcacagtaaagaagagcaaaaatatactgtttgtcatttcgaaaccggatgttttcaagagcccgaattcagacacatatgttgtctttggtgaggctaagatagaagatctgagctctcagctgcagacacatgctgcggagcagttcaaggcccctgatc

SEQ ID NO: 2092 - DNA, 441 bp, Lilium asiatic
cggacgcgtgggcttccccgttgctaattcttagattcatcaaaggaattattcgagcttgcacattatattctccagccaagtcatcagatgtctgccaatcatctgatctcagaccgattcatcttcctagagcttctccatcctttatctcagcaataggaaggctatggtagtaaaatttatagtcaagcttgccttggaggccacgattcttggataccaagcaatggaagagcggtcttgccttggatacgaaggttcttggaggtcaaggaaagactgtgtcggatgttagcaagataaatctataaagctaaagagatgaagccattcgggagttggtcagctagggagtgaagacttgatcctctgaagaggacaagtggtggatttctttgaagttcagtttatgtgttctggagattgagaatatgtctc

SEQ ID NO: 2093 - DNA, 375 bp, Lilium asiatic
  modified_base (20)..(20): a, c, g, t, unknown, or other
ctgactcgtggtcttccccnttgctaattcttagattcatcaaaggaattattgggtcttgacattttattctccagccaagtcatcacatgtctgccaatcatctgatctcagaccgattcatcttcctagagcttctccatcctttatctcagcaataggaaggctatggtagtaaaatttatagtcaagcttgccttgtaggccacgattcttggataccaagcaatggaagagcggtcttgccttggatacgaaggttcttggaggtcaaggaaagactgtgtcggatgttagcaagataaatctataaagctaaagagatgaagccattcgggagttggtcagctagggagtgaagactcgatcctctga

SEQ ID NO: 2094 - DNA, 430 bp, Lilium asiatic
  modified_base (11)..(11): a, c, g, t, unknown, or other
  modified_base (36)..(36): a, c, g, t, unknown, or other
  modified_base (84)..(84): a, c, g, t, unknown, or other
  modified_base (222)..(222): a, c, g, t, unknown, or other
tttcttccccntttcttattctcatattcatcaaangaattattcggtctagcacattttataatccagccaagccatcacatntctgccaatcatctcatctcatacctattcatcttcctatatcttctccatcctttatctcatcaatatgaattctatcgtattaaaatttatactcaatctttccttttattccactattcttttataccaatcaanttaatagctttcttgccttttatacgaaacttcttgtacgtcaaataaatactttctcgcattttatcaatataaatctattaatctaaacatattaatccattctttacttcttcatctaattaattaatacttcatcctcttaaaaatacaaatcattaaatttcttctaacttcactttacttttttctctacatttataaaatt

SEQ ID NO: 2095 - DNA, 437 bp, Lilium asiatic
gacccacgcgtccgggatgattgtaactgtccgtccatccctcttcttctttgctggtcgctttgcatattggttctttgtgcttgttttcgattttctttcctcataatagcttttgcacaacattatctacttgtctaatatcttaatttgatgtgttatcttataggtctaagcaaactaggaaggatctatgtcactttcgagtgttcccgtccaaaatatttgtttgcttgcaattttttgaaatacttgatgatttcattcaacaggaaatcagaaaaccaacattgctgacaacttgctctgtgagttctattgcttatgacttgctaaaaatatctgaattttcatttaatattccttgctttgataatactctgctgagtataaaatagtttttaatagtatcaggttaccgattcttatagatcatt

SEQ ID NO: 2096 - DNA, 398 bp, Lilium asiatic
  modified_base (340)..(340): a, c, g, t, unknown, or other
gcgcacctgtttgcatgtgttcagagagcgattgatgccaatgctacggccgccgagggggaggaagttgagctgtcgtttcttgcccgggttgggaaagtacacttcaaagaaggcactactttggactccataagaaaggccgcagttgctgaagcaaattggaatacagtgcacaaatcatttaacactgatgtttctgatgcctacatggaagacatacaacataaagttgtcccgaaaactgaattaggttttgagtcagcgaaagagctttaccatgtcaaggtgtatgataagtttcgacctgattcgactatctcatgcaagtgtactgtangagatggtggtgagctcaaaattcacaagatggagctgaatcatgtgcggcactttgt

SEQ ID NO: 2097 - DNA, 432 bp, Lilium asiatic
ctccacctcacacatccttcaattcaatctcatcgatgtcgggccgcggcaagagtgggaatgtgctcttcaaaggcggagcgaaccggcaccgcaaggtcctccgcgacaacatccagggcatcaccaagccggccatccgccgcctcgcccgccgcggcggtgtgaagcgcatcagcggcctcatctatgaggagactcgcggggtgctcaagatcttcttggagaacgtcatccgtgacgccgtcacctacaccgagcacgcccgccggaagacggtcacggccatggacgtggtctacgctctcaagcgccagggacgcaccctctatggcttcggcggctaatctaactagggtttctgcggatgaactagaaatttaaatcgtctcctctttatcttaagtgtgtttagtatgtgatgtgaatctt

SEQ ID NO: 2098 - DNA, 344 bp, Lilium asiatic
  modified_base (20)..(20): a, c, g, t, unknown, or other
ttttcttgcccctctctctnaaaatacacttcaaagaattcactactttttactccataataaaaaccgcactttcttaatcaaattttaatacatttcacaaatcatttaacactgatctttctgattcctacatgtaatacatacaacataaacttttcccgaaaacttaattatctttttattcatctaaaaagctttaccatttcaacgtttatgataagtttctaccttattctactatctcattcaaatgtactgtatgaaattattttgaacttaaaattcacaatatttatcttaatcattttcgtcactttttagtagacatatcttgtctttat

SEQ ID NO: 2099 - DNA, 448 bp, Lilium asiatic
tcggtacttctacaaccgaatggttaaccactttgtgcattatttcaaaaggaaccccaaaaaggacatgagtggtaacccgagggccctcaggaggttgaggacatcatgtgagagggcaaagaggaccctttcctccactgctcaaactacaattgagatcgactccctctatgaaggcattgatttctattccacctttactcgggccaggtttgaggagctgaacatcgatctgtttaggaagtgtatggaacctgttgaaaagtgtctcaaggatgccaagatggacaagagtagtgttcatgatgttgttcttgttggtggatctaccaggattcctaaggtccagcaattgctgcaggactttttcaatggtaaggagttgtgcaagagcatcaaccctgatgaagcagttgcttatggtgctgctgtccaggctgctatt

SEQ ID NO: 2100 - DNA, 440 bp, Lilium asiatic
tcttactcttggtctgactcgtggtctgacgcttgggttctccgtctctacgctgggggaagaggaacaagaaaccgtatacgcatcgtgttttaggaaatggctgagtccaagcctgagttgaggaagccagtgtttatcaaggtcgatcaactccggccgggcacgagcgggcataccctcacagtgaaggtggtgagctcgaagatggttatgcagagggggcggtctgatggtccgcaatcccgacagatgaggattgctgaatgccttgtgggggacgagactggaattattgttttcactgccaggaatgagcaagttaatgtgatgacacctgtaaaaaccgtggtacttcgtaacgcatagattgacatgttcaagggatcaatgagactggctgtagacaaatggtgccgtgtggaataagccgagcaagc

SEQ ID NO: 2101 - DNA, 436 bp, Lilium asiatic
  modified_base (385)..(385): a, c, g, t, unknown, or other
agagatactcttggagcataaaggaattgtttgggcaaattgcattgattgtttggatcgggccaatgtcactcagagttatcttgctgcgaagtcattgaattcacaactacaacaaatgggtgtattcacttcaagcgaacagatccaaatgcatgcagaaatcttcgaaatgttcaagatattgtgggttgaccatggagatgagataagcttggagtatgctggcactcatgccttgaaaggggaccttgtcagatatgggaggcagacaatatcaggattaattaaggatggaatgagctcacttgcacgatattatttgaataacttccaagatggcattcgacaagatgcacttgatcttgtaagtcgtcgatatatncgtgggggaagtggtccgactttccatgttaatgcttttgattcattatcg

SEQ ID NO: 2102 - DNA, 438 bp, Lilium asiatic
ggattttattccagggattgatgggccaagtgagggtgtccccagggttttggcgggcttgagtaataatctccttcggggtgagccactgaagctcgttgatggtggccagtcccagagaacgtttgtgtacattaaggatgccattgaagcagttcttttgatgattgaaaatcctgctcgtgccaatggccacatctttaatgtgggaaatcctaacaatgaagttactgtcaagcagcttgcagagatgatggctgacgtgtattcaaaagtatcaggggagccaacaattgatgtaccgacgattgatgtaagctccaaggagttctatggtgaaggatatgatgacagtgataaacgtattccagacatgaccataatccataagcaacttggctgggacccgaagacttcactatgggacttactggaatc

SEQ ID NO: 2103 - DNA, 415 bp, Lilium asiatic
aatacagtaagtcatataaggccagaagatgcaaagacttctgtaggagtgtcctttaggcgaagggttgatgatatcatgaccaaaaatgcagggaaaacactacaagagagagtatcattcttgatgggacccgatcgaaatgttacagagaattctgattctttgttgcgtgaattgaaccctgaaacaggtgatgttctgcatatagattcggatattaaaaatgaaaaagtgtcaactggaacggtactgaaatatacattccagaggaagcggaagagggtccctacaaacaacaacgaagaaaattctctcctacaggaaaagacggtggatcaccgaagtgccttgtcagagccccgtaaccctagctcaacattggagtttgatcgaaaagataggcgattagtgc

SEQ ID NO: 2104 - DNA, 412 bp, Lilium asiatic
cgtccgggatactcattcttggggctactaatcgtccgtttgaccttgatgatgccgtaatacggcggttggcgagaaggatatatgtggaccttcctgatgctgataatcgtatgaaaatattgaaaatacttctttctcaagagaacctggatccaggctttaggtatgacgaactcgcaaactcaactgaaggatactccggaagtgatttgaagaacctttgcgttgccgcagcatatcggcctgttcaagaacttctagaacaagaaaagaggggtgaggaaagtacagcacctttgttaaggcctctaactttggatgattttatccaggcaaaagccaaggtgggcgcatctgttgctcatgatgctgcgtctatgaacgagttaaggaaatggaatgagcaata

SEQ ID NO: 2105 - DNA, 439 bp, Lilium asiatic
ctctcaacatgtctgcgctctgggatttaccggtcatactcgtctgcgagaacaatcactgtgggaggggcactgcggaatggcgggctgctaacagtcctgcatattacaaacgtggggattatgttcccggtctcaaggttgatggaatggacgctcttgctgtgaagcaagcttgcaagtttgccaaggagcatgttctgaagaatggacctattatacttgaaatggatacttatagatatcatggccactcaatgtctgatcctggtagcacttatcgtacccgtgatgaaatttctggtgtgagacaggaacgtgatccgatcgaaagaattaggaagttgatactatcacatgagctagcatctgcttccgaactgaaggatattgagaaagaagtccgaaaggaagtagatgaggcaattgctgaagccaa

SEQ ID NO: 2106 - DNA, 384 bp, Lilium asiatic
  modified_base (52)..(52): a, c, g, t, unknown, or other
  modified_base (86)..(86): a, c, g, t, unknown, or other
cgcgtgcggtctgaacatgtctgcgcttctgcatttactctgtcattctcgnctgcgagaacaatcactaggggatgttcacttcnaaatggccccctcctaacaatcctgcatattacaaacgtggggattatgttcccggtctcaaggttgatggaatggacgctcttgctgttaatcaagcttgcaagtttgccaaagagcatgttctgaagaatggacctattatacttgaaatggatacttatagatatcatggccactcaatgtctcatcctggtagcacttatcgtacccgtgatgaaatttctggtgtgagacaggaacgtcatcccatcgaaaaaattatgaagttgatactatcacatgagctagcatcttctt

SEQ ID NO: 2107 - DNA, 393 bp, Lilium asiatic
ctggtctaccaagatctgttctccaatgattttctcctctctgattcatttcccgacactgagattgaaaatggtatgctgtgggaggtggaagggaagtgggttgtccaaggagccctcaatgtagatattggtgcaaacccctcagctgaaggtggtgaagatgatgaaggggttgatgaccaggccgtaaaggtggttgatattgttgacaccttccggcttcaggagcaacctgctttcgacaagaagcagtttatggcatacatgaagcggtatgtcaagcagttgacgcctaaacttgatgccgagcagcacgtgctatttaagaagcacattgagggggccattaagtttctgctttcgaagcttagtgatctgcacttttttgtg

SEQ ID NO: 2108 - DNA, 430 bp, Lilium asiatic
attaaactcctatattaatattacagtacgctaaaaacacacttgagttcgtctaaattctccactgccattgcttttacaagtatagttgcctatagtccagtatggagagattttggagctgagcccaccgagcctttggactgggccgagaggccaagaaccatgtaggcaacatgtgctgagtagctccacgactcactgaccgaaagaccaaaacatataaaaagccgctgtaatgagaaaaaggaaaagcgaccctccggtttccaatatgttagcagatgaaacactgtgggcgtcgacagtatagactgctccagatttgtcatcttggactttgatgctcccagaacagttgtagtcagtccagccaatcacttgtttttcaagatcatagacaactaacttatttgatagaagtatgtcc

SEQ ID NO: 2109 - DNA, 418 bp, Lilium asiatic
  modified_base (46)..(46): a, c, g, t, unknown, or other
  modified_base (49)..(49): a, c, g, t, unknown, or other
acccacgcgtactttttttttattaaacatccaatttaaatttcanacnctaaatcacacttagaccagttaatttataaactgcccaccccctcacaattatattttcctatactacaccatccataaaccttataccttaacccaactatccctttccactcaccaaaactcccaaaaccatacaacaacatcttcttcaacctccaccactcaccaacctaaagaccaaaacatataacactcccctatacttataaaaaatactatcaaccctccacctaccaatattataacacattaaacactatcaacctaaaccttaccaactaccacacatctctcatctaatacaaatacactccccatacaactctaaacactacaaacaatcacatcctttcaaataacataaaca

SEQ ID NO: 2110 - DNA, 443 bp, Lilium asiatic
aaaagattttacttgcattccaggctgtgattcagatgcttaaattggatgagagcaaccgtgatactcatcgctgtttgataagattcttccacaaaataagcacccttccttctcccgtgactgattcccagaaactgatttggaatgttctagaatcagaaagaccaaatataagtcaattgcatgggaagtcattagctgaagctaatcaggcttttcttgagagacataaagattcgttgatgcatagagctgcagctgctgaaatgttgtttagtcttgagccaggcaaaaagatcgaggcactcaagcttatcgaggagtcaacaaataaccttgcaccaccaaatggtgttcttgggcctgtcaatgaatggaagcttcaagactgtattgccgtccacaaattgcttattacagtcttcgatgatattgatgct

SEQ ID NO: 2111 - DNA, 408 bp, Lilium asiatic
  modified_base (372)..(372): a, c, g, t, unknown, or other
cgtgcggttttcttgtaaagagaatagaattacttttttgtttggtttacatgatagggtgaaagcaaaagagccggttattaggagtgatgacccggcttctggtcttcaagggccgggccttcgtcgatgtctccttgtaagcttggtgatccggtctatctcgatcttgggggtgggctcctggtgcttcgtcctgaaacaaggagaggtagcgcctcgcgttaggaaagagcgcaaggcgtgtgccccgcggcaactctccagcgtgaggatgagttccgagtattgtacggcgcactaggcgcgtgtatgtgggtgtttgagagagttctcacgtggttaggattcctggcggattgtagatagttntttggttgtagagagtgtgtgatttgataactgcat

SEQ ID NO: 2112 - DNA, 442 bp, Lilium asiatic
ggtgttgttactcgttggggtgttacccgtcttccccgcaagacccacaggggtctgcgcgaggttgcttgtatcggagcatggcatcctgccagggtttcatacactgttgcccgtgctggtcagaatggttatcaccaccgtactgagatgaacaagaaagtgtacaagcttggaaaggcaggagaggagtcacacaaggctctcactgaatttgacaggactgagaaggacataacccccattggtggtttccctcactatggtgttgtgaaggatgactacattctgataaagggttgctgtgttggacccaagaagagggtggttacccttcgtcagtctcttctcaaacagacttctcggctggcccttgaggagatcaaactgaagttcatcgatacgtcttctaagtttgggcatgggcgtttccagactactg

SEQ ID NO: 2113 - DNA, 438 bp, Lilium asiatic
gctcgagatttcccctcccgattcttcgcctaagaagtcctggccgatatggaagacaacgatccatcaccgtcaaccccctgaccatcgtcgatccatcctcatcctctgccgcttcattgaggatgagttaaatgacctcagcagactcgaatatctcattatcacaacggatatcaacatattgcttgaaagatttggaggatcttgatattcaagcggtaattaaagaacttgtagaatttaatttatggattagtgtttgtatgggttgtatgtaggtttaattagtgtttgtgatgatgttgcacgccatgctcgtcggatcgatatttttgtcgcacgtctcctcctccactcccgtccctacaaccaatcatgcgccgactgtggcagctgccgccccaatgcgcatctatcacctatggcatctttatc

SEQ ID NO: 2114 - DNA, 353 bp, Lilium asiatic
  modified_base (13)..(13): a, c, g, t, unknown, or other
  modified_base (19)..(19): a, c, g, t, unknown, or other
  modified_base (27)..(27): a, c, g, t, unknown, or other
  modified_base (31)..(31): a, c, g, t, unknown, or other
aatttcccctctnattttncctttaanccgnccatatgaaggaaaagtcattttaaaaacccccgaccacctcatccatctatcctcttcccttatttaaataaattaaatgacctcatcatactctaatattattatcacaactcatatcaacatatcctttaaaaatttaattatctctatattcaacctataattaaataactatcataatttaattcatacattaccattcccataacttatatttaaatttaattatcccttatgatgatattacacaccattctacttctttcataaattttattaaaacatatcctacttcactacctacctacaaactatcattc

SEQ ID NO: 2115 - DNA, 381 bp, Lilium asiatic
  modified_base (56)..(56): a, c, g, t, unknown, or other
  modified_base (60)..(60): a, c, g, t, unknown, or other
  modified_base (65)..(65): a, c, g, t, unknown, or other
gggccgacccacgcgtgctaaaagattttacttgcattccattctttgtttcaaangccnaaatngaatgaaagcaaccgttatacttatagctgcccgatgacattcttccacaaaataatcacccttccttctcccttgactgattcccacaaactgatttgaaatgttctataatcataaagaccaaatataagtcaattgcatgcgaagtcattagcttaacctaatcatgcttttcttgataaacataaaaattcgttgattcatagagcttcagctacttaaatgttttttactctttacccactcataaaaatctaggcactcaagcttattcatgattcaacaaataacctttcaccaccaaatggtctttct

SEQ ID NO: 2116 - DNA, 385 bp, Lilium asiatic
  modified_base (315)..(315): a, c, g, t, unknown, or other
  modified_base (342)..(342): a, c, g, t, unknown, or other
gaggtcgaagaacaggtcggtggaagaccctacaacgaaatctacatcttcaagagtgcctgaagcacggtccatccccgacatcgtgaatctccagcaagtgccatggggatcatgaacccagcttcatcaacgacctcttcgagaagatggcacaagagtccgcccgcctttgccgttacaacaatgaagaacaccatcacctctcgcgagatccagacctctgtccgccttgtcctccctggcgagctcgccaagcacgccgtctctgatggcaccaatgcggtcaccaagttcaccagcgcttatgcttangcttaggcttttgttgtgttcttgtcngttttgtaattttagctgctatcaatatgtttcgatttctgat

SEQ ID NO: 2117 - DNA, 378 bp, Lilium asiatic
cccacgcgtccgcgtcggtgatggcggcacatggaagacgacattcgtcaaacgtgatctggctggtgaattcgagaagaaatatgaaccaactattggtgttgaggtgcatcctctggatttcttcaccaattgcgggaagatcaggttctactgctgggacactgctggtcaggagaagtttggtgggctgcgcgatggctattacatccatggtcagtgtgcaatcatcatgtttgatgttactgcacgccttacctacaagaatgttcctacttggcataaagatctttgccgagtatgtgagaacattccgattgtgctttgtggcaacaaagttgatgtgaagaacaggcaggtgaaagccaaaatggtcac

SEQ ID NO: 2118 - DNA, 402 bp, Lilium asiatic
  modified_base (31)..(32): a, c, g, t, unknown, or other
  modified_base (48)..(48): a, c, g, t, unknown, or other
  modified_base (84)..(84): a, c, g, t, unknown, or other
ctttattttttcactttaaaaacgacattcnncaaacggggtctagantaattataaagagaacaaatcccaaccaactattgntctttaagtgcatcctctgcatttcttcaccaattgcgggaacatcatgttctactgctgggacactgctattcatcataaatttcttaagcttctcgatatctaatacatccattgtcaattggcaatcatcatctttaatttactacaccccttacctacaaaaatgttactactttgcataaacatctttgcccaatatgtgagaacattccgatttttctttgtggcaacaaacttgattttaataacatgcacgtgaaaaccaaaattgtcacttttcacattaagaataacctccaatactatgacatctca

SEQ ID NO: 2119 - DNA, 428 bp, Lilium asiatic
cacaatgctacaattgcagcccacactgttataatattgtagcccacactgctacgataggagcccacacttctacaatatcagttttatatttaacatgccccctcaagctggagaggactaaaaattaccttcagcttggacacaatgaaaaatcaaactcgtgtggtcgtactttagtggcttaaagttaccaagaactagttgacgtagatgtggccactgatgccgataatgtcgaggaagtctctgaggaacggtcatcgttactttcgatgtcgaaaaatgagggagtaagctcgtatatatcgaggatgggtcatcgggagtccgatcgtgtcggatgtcgtacgtcggggagaagaagcacgtcggtagagcaatcgttgggattactggatcttttcccgggcccgtacaccgagaga

SEQ ID NO: 2120 - DNA, 247 bp, Lilium asiatic
ctacataactctcgctataactcttcatgactaaaacttacactcctctaatacaccatataaaacgctcaaattcttctcgctcttaaatcactcactcaaccaactatcttttttacgcaccatttccaacctctacaaatatttcttcgtatacctctgatgaacaacaccctttaatttcattctagctacatcaggaatcacgtacgtatctatcgctacagcctcaacactattacgatca

SEQ ID NO: 2121 - DNA, 322 bp, Lilium asiatic
taactggattatgggaatattcttataataaccccccaatctaacatctaacttttaagggttgagggggcaataacaatgccattaaaacttggggatatgacgaagtcccaagttcaagtttatccaactagctggattgtttcactatttttctttctgtgcccattacaccttctattggtcttcatgtaaaagggtattgattttaatgtttgttaatataatttggatattgtagcattgtgggctataccactgtagcatgatagactatgtaatgtagtattgttggctaaagtaggactacattactgtagca

SEQ ID NO: 2122 - DNA, 344 bp, Lilium asiatic
gtagatttttgcaagaccatggatttctggcaacaagataagtggactgggtacttgggtgttaagtggcacataatcaaagatgtcccaaatccacagttccgtcatgtgattttggagaacaatgaaaacaagcctgtcacaaacagtagagacactcaagaggtgaaatttgtccaaggcactgaaattttgaacatctttaaaaactactctgcgaaaacttccatactcgacgacttcggtttctacgaaaatcggtataaagcaatgcgacaagacaggaggatcaaagaccctatttcgaatgtggagcttctgtcactgaaagatgatgacaaggt

SEQ ID NO: 2123 - DNA, 365 bp, Lilium asiatic
  modified_base (141)..(141): a, c, g, t, unknown, or other
gcgtccgcctaccgacctgaggagttggtgctctggaagaacagattgataactcgaggcaggcaccccaaaacaaagatgtatcttaatctgatgagaggaagtttgttggctcgtgctccctcgctatttcgccctcgngctctattatgcacacaaatcacaagaagccaatggcagcagcaagtgcaacggcaagatgaggttaagggtggtcaagatgaggtttctggatggcagcagcaagtgcaacagcaagatgaagttaagggtgttcaagatgacgttaagggtgttcaacatgaagtttctggatggcagcagcaagtgcaacagcaagatgagggtaaaggtgttcaacatga

SEQ ID NO: 2124 - DNA, 385 bp, Lilium asiatic
gaaggggaaggccggcgttgacccttacaaacccaagcgccccgccagtgccttcttcgtgttcatggaggagttcaggaaggagttcaaggagaagaaccccaacaacaaggccgtctctgctgtgagcaaggctgggggagacaagtggaaatcgatgtctgatgctgataaggcaccctatcaggctaaggccaacaagcgtaagactgagtacaccaagaacatggacgcctacaacaagaaacagaagactgctcctgcggctgccgaggaagacgaagaagagtccgacaagtcgaagtctgaagtgaatgatgatgaggatgacgaggaggagggaagtggtgatgatggcgatgaggaggatgaggatgacgagtag

SEQ ID NO: 2125 - DNA, 445 bp, Lilium asiatic
  modified_base (11)..(12): a, c, g, t, unknown, or other
gacccacgcgnncgacctaactgcatcatgggattatcctcataataaccccccaatctaacatctaacttttaggctgggagtggtcaataacaatgccattaaaacttggggatatgacgaggtcccaggttcaagtttatccagctagctggattgtttcactatttttctttctgtgcccattacaccttctattggtcttcatgtaaaggggtattgattttaatgtttgttaatataatttggatattgtagcattgtgggctataccactgtagcatgatagactatgtaatgtagtattgttggctaaagtaagactacattactgtaccattgtgggttacacaagtgtaacaattggggctgcttgcctgtaaaaactcttctaaaaaggcaatggaaatattttcaatctttctttcaaaacctttcttctttt

SEQ ID NO: 2126 - DNA, 364 bp, Lilium asiatic
atcgatttgtgattgacaacttcaatagcaactcattgggtgagttgaaggagcatgaggtggaagagtttgatcatccttctgaggtgcgtgcaataattgaaggacaatttctctcaatgcgaggacatgctgagagattcggaatgccaacacctcccaaacgcataatagcaactggtggggcatcgtctaatgagagcattctcagctcaatagctagcatcttcggctgtccagtatatacagtccaaagacctgactctgcttcgctcggtgctgccttgagagcagctcatgggtggttgtgcaacaaaaacggcggtttcgtgcccatctcaagcatgtatgagggcaagttgga

SEQ ID NO: 2127 - DNA, 441 bp, Lilium asiatic
ccgaggttaccatctttgcattggaattggctatgtaacttccacaaaggaggtcaaggtggtcagattttctcgtagcgatgaggtcgatcgtcacattgaggattgttgtgaggtattcatcttgggtgctagtgagtggagagaagaaaagaatgaatacgctcatcctccaatacaattccaattcgagtggggtgcacctttcctccaagggggcctacatcttctgccatgcgttgactttcctggtccagatgattttatatttgtgtttgacatcgatactgaagaatacagggccattccgttaccagattactatcatagcgaggagggtttggctcactttgagaccctgcatttgtacttgaaaagagtttgaggttcattgtaccttatctttgacttcacagcaagcttggaactatgatgctaaaa

SEQ ID NO: 2128 - DNA, 399 bp, Lilium asiatic
  modified_base (361)..(362): a, c, g, t, unknown, or other
catcacttcaacctaatggatgctattcccaatccttccaaggagcagctagtagatgttgtgcagaggcatttcatgtcacaacaattggatgagttgcaggtgattgtggggttcgtgcaggcggcaaagcggctgaagtcggtctgcaattgactgtggagagaactggtgccctcatgctactgacagataagtagtagatcgtttaattcctgtagttaagttaaagtctatgtaacaaatgtgtccgaatgtatgtggtggaacagcgtgggtataagtataatgggttttcggtagctagaaagacatgtaagtaaacatgggcagtggtaaatacatttgcagtttgggtgannaaaaaacaatcctaaaaaaaaaaaggggcgggcggtt

SEQ ID NO: 2129 - DNA, 294 bp, Lilium asiatic
aaaaccgggccgacccacgcgtacggggacgcatgggcttacgcatacgtttttattatacaaaaggcacaagattgtctcgggggcgtggaaattactgcggaaaatgtaacacatcgctttggtgtaacccgagaggagcaagatcaagctgctgttgaatcttataagaaggcatttgctgttactgttgctggtaaattcatagaggaaatagtttctgtacccacaaagattgtggacccaaaaactggaaaggaaaaaccaataattatctctgtggatgattgaaat

SEQ ID NO: 2130 - DNA, 384 bp, Lilium asiatic
gaggaagttttccaagttgggtggagcccaaagaatgagactattctatcatcttgctgtcgtggtaggaggcttatggtgtgggatcttagcaggattggcatggagcagactcctgaggatgctgaggatgggccaccagagttactgtttattcatggcgggcacacgagcaagatatcggacttctcctggaatccatgcgaggactgggttgttgccagtgttgctgaagacaacatacttcaaatatggcaaatggcagagaacatataccatgacgaagatgacatggttatcgataacccacaaagggccccctaagttgtctatctgcatttctctggctcgtttcatcagtaacctgttcatgtatcattacct

SEQ ID NO: 2131 - DNA, 438 bp, Lilium asiatic
cgtcttcccacccttttgagaatccacgccaaattcttcaatcatggaggagaatctggacgcgtcgatcgaagccctattgaacgtggagaaacagatgaggctggccggcgacgtcgccggcaccaagaaggcggtgattgacatcgtggagctctgccacaaggccggggcgtggaagacgctgaacgatcagattgtggttctctcgaagaggagggggcagcttaagcaagcagtggctgcaatggtacaaaaagcgaccgagtatattgatgagacgcctgatattaatacacgcattgagttaattgaaactctgaacaatgtttctgctggaaagatatatgtggagattgagagagcacgactggtaaagaagcttggcaaaattaaaagaagaacagggtcttattgccgaggcccgtgatttgatgc

SEQ ID NO: 2132 - DNA, 355 bp, Lilium asiatic
ttctcactgggggaatgttcaagtgactgagcattataatctgaagcatgctggagcaaagcatagtggaatcttttcgaggctcgaataccaatccaggccatctgttaatggcgcctcttcatttaagcaacttcttgctagactgcctccacatgttcactctgtttactatcgggatgagattggcaatatttcctcatcacatcttcgttatggtgctcttaagtcagaacttgaaatagagcctcgatatcccttgtttggaggttggaaggcttcttttgttatcggatatggactacctttgcaagattttctgtttgagtcccttgatggcaaacggtacctgaac

SEQ ID NO: 2133 - DNA, 435 bp, Lilium asiatic
cccacgcgtccgctctactaaagcttcagtctctcatcaatcatgtctgggcgaggaaagggagggaaggggctcggcaagggcggcgccaaacgccaccgcaaggtgctgcgggacaacatccagggcatcaccaagccggccatccgccgcctggctcggcggggtggagtgaagaggatcagcggcctcatctacgaggagaccagaggtgtgctgaacatctttctggagaacgtcatccgcgatgccgtgacctacactgagcacgcgcggcgcaagacggtgacggcgatggatgttgtgtatgctctcaagcgccagggccgcaccctctatggatttgggggttgatctagcactgttctcttctcttctgggttggtggtctctatctgatttggggtgtttcatattactgggatgaaatgaagt

SEQ ID NO: 2134 - DNA, 389 bp, Lilium asiatic
gacataatgtgagtctctttcacactatcgcttctgcaggaatggtaacatagttactcatcaaacatcaggagacgatacacctctgacatcatttgcgtggccagataaccagagaccacgggtgtgtatattgggtgggggatttgggggcttatacactgctctaagattggaatctctcatatggccagatgataaaaagccttaagtgctgcttgtaaatcaatctgattgttttgtttttaagccaatgctctatgagcttctatcaagagaagtagatgcctgggaaattgcaccatcatttacagatttgttgaagaacaccagtgtacaatttatcaaagataaagtaaagcttttacacccttctgatcacttaaagt

SEQ ID NO: 2135 - DNA, 370 bp, Lilium asiatic
cggactcgtgggcggacgcttgggtgtttattatacaaaaggcacaggattgtctccggggggtgggaattacttcggaaaatgtaccacatcgctttggtgtaacccgagaggagcaagatcaagctgctgttgaatctcatatgaaggcagctgctgcgactgctgctggtaaattcagagaggaaatagttcctgtacccacaaagattgtggacccaaaaactggagaggaaaaaccagtaataatctctgtggatgatggaattcgaccagagacatcactgtctggtctaacgaagctcagagcaggattcaagaaagatggcagcacaactgctggaaacttaagtcaagtgagtgatggtgc

SEQ ID NO: 2136 - DNA, 353 bp, Lilium asiatic
ctaaaactcctctggaagaaagcaggaagaaaatatggttggtggattctaagggtttgagtgtgagttcacgcaaggagtcacttcaagacttcaagaaaccttgggctcatgagcatgaacctgtcaagactctcttagaagctattaaggccatcaagccaactgtcctgataggatcgtcaggagcgggaagaactttcacacaggaggttgttgagaccatgacctctttaaatgagaagcccatcattcttgctctgtcaaatccaacctctcaatccgagtgtactgctgaggaagcatatacatggagcaagggtcgagcaatttttgctagcgggagccccttt

SEQ ID NO: 2137 - DNA, 450 bp, Lilium asiatic
ccggaacggaagggccggcccgcgcgtgcggacataatgtgagtctctttcacactatcgcttctggcaggaatggtaacatagttactcggcaggcatcatgagacgatacacctcttacatcatttgcgtggccagataaccagagaccacgggtgtgtatattgggtggtggatttggtggcttatacactgctctaagattggaatctctcatatggccagatgataaaaagcctcaggtgctgcttgtagatcagtctgattgttttgtttttaagccaatgctctatgagcttctatcaggagaagtagatgcctgggaaattgcaccatcatttacagatttgttgaagaacaccagtgtacaatttatcaaagataaagtaaaacttttacacccttctgatcacttaaagcaagtttgaaatgaaaagtcttggaaaatct

SEQ ID NO: 2138 - DNA, 357 bp, Lilium asiatic
gcatctttgggtgaagttggagaatattgccgtcatgatggaacaaatgttggtagatcctaatattcaggtagcaccagatcaacttccagagattactgctaatggctcagctttgtgttttcataagagtgggagagaacatggcatctgccatgagcacgacctccttcgagtattgataaagaatgcaacatgctcacatgcactagctctccatatgtgtatatctgattcaacctttcatgtgtactctaagcaaggtcggatatttttccgggtgaatcaaagagctattatggtcgtcgtcggtgagcaaattcagaaaaagagctgtgggctctataagaaagtgat

SEQ ID NO: 2139 - DNA, 409 bp, Lilium asiatic
catcgatcaccggcagcccaccctaatcttctcgggcgcctgccatggtagacggcgaaccaccccgatcttttccggcgactgccatgtgccatggtcgacgacgaactgccccgatcttttctggtgcctgtcgacccgccccgatcttctttgtgcgcatccatggttcagatagctgttgggttcagatagcagcggtgtctatcagtagcagcactgacgaaaatggttctattggcgcagcaaggggagcgacggtcaattgcttgtctagcaaacgacggtcagctgcaaggggagagcgacgctcagcaaggaaaagggttctgttgcttgtctaaaaaacgattgcctttgcttgtctagaaaacgatcaaggcacgtacaatttttctctgaagtatag

SEQ ID NO: 2140 - DNA, 168 bp, Lilium asiatic
cgaccgacgcgttcggatttattacctgaagttcaccataatctttttttgcacctaacatagaatacggcaaaccgcgggtatcttttcacgagactgccatttaccaatttccactactaactgaccttatactacttgttgccttgggacaccccctcatcttct

SEQ ID NO: 2141 - DNA, 413 bp, Lilium asiatic
  modified_base (320)..(320): a, c, g, t, unknown, or other
  modified_base (352)..(352): a, c, g, t, unknown, or other
ggtggacgcacacgcagttttctccagcgctcgtttgtccagtccctcatcgctgttgcagcggtctgtgtctgtgtctgcgtgtttatccgtggcatgccaaagatcaactctatcgcacctttcaagtgggagaacttgcattatggaccgcggtaacttcagagattagtatacagtagtaaattatcgtagtcgtcgagcagagctagtggctggaggaataaagtgcaagaaattctcgcaactcgagttcttgttgagggagggtgtgtgagctctctcccttcccgggatgtgtatatgttctttcattttgntccatccatgacagtggtagaaccccagtagnattgggttatatattatatatactaatagaagtactgtttatgtagatgaatagatggtct

SEQ ID NO: 2142 - DNA, 434 bp, Lilium asiatic
cccagtcggagctccatcctcgtcgtctccgccgctcctaagaaggcttacacgagcgaggagaagcagaggatcctcgagagctacggccttgacccggcagattttgcaccggacccgccatcccacaagaaggagaggaggcgggggagggggagtgaaggcgataaggcggggagagggaagcggtgggaaacggtaccggaggagacaaagaagattcctcgtaccacacataaattgcttcaggaggaaaatcccgcaggacaaagttgctctcaccaaagggcatggatgtacgtccaatgatggaagttgtgagaggagcagcctttgatatcttacaggtagcaggtggttctcctgcgtcattaagacccggccgttggttagatttgtatagtggtactggatctgttggaatcgaaactcta

SEQ ID NO: 2143 - DNA, 448 bp, Lilium asiatic
  modified_base (24)..(25): a, c, g, t, unknown, or other
gaccgacccacgcgtacggttatnntttcccctcttgcaatcatctttttatttcctatcaccatcactaactaacagctgctgttttttagggaggcaatcactcaccttacttctgatgccaaacaaaagaatcgcaccttcacttaaactatttaacttcatattggtttgaaaaattatcatccttaaaaatataaactatttaatagatctttcaaattgccccatattcccagacctaacattaaggtatgcatgcttcgcgattctcaacatgttcatgatgcacagaaaattgaattagactatatttattttaaatggcttgtgaagatgaacaaaaacaacatactgttcaataaccttactaataactatcatactttcttatcatcatacaccattattaaacaaattcctcgaccttttatccctgttcttaaca

SEQ ID NO: 2144 - DNA, 422 bp, Lilium asiatic
agtaaatggaagaagctggagagcagcgatttacagatttgactgaattattgaaaggaaatatcagatttgccacactttacctcctatgattgggaatgtggaaccctgccactatgtggtcaatctcaagaggtgcaacaatgatggaaaagaggactgcacccattggagtgtgtcagaggaatcaatctacacttgttgggagggtgtggcaatctgtatatgttgtacgaatttgtgcacccagggcaacctgctgcagatttgatgccatacaaatataagcacggtggacaaatgttgcctgagcttggactttctctgtgagtagtgagcacaccttacgcaaatcttgccggacaacaacaatatatggacggtccattttgacttggaatgtaacgagttgggaggggtgt

SEQ ID NO: 2145 - DNA, 386 bp, Lilium asiatic
cggcggtgcaggaacaatgagccgaagcgccggaaccgcgggagggaagggagccgtgggtgggaagggagcgaagaagaagggatcgacgttcgtgatcgactgcgggaagcccgtggaggacaagatcatggacatcgcctccctcgagaagttcctccaggagcggatcaaagtcggcggcggcaaggccggcgcattcggcgacgccgtcacgattacacgtgacaagagcaagatcaccgtcaccttcgacggtcccttcttcaagagatatttgaagtacttggcgaaaaagtacctgaagaaacataatgtgcgtgattggcttgaggtgattgcatcaaacaaggatcgcaatgtgtacgaaatgcgatacttcaaca

SEQ ID NO: 2146 - DNA, 392 bp, Lilium asiatic
aaattcctctccccctcttttcaactaaaatcttcaatggcgcccaaggctgagaaggggcgcggtggcggagaagaagccggccgacgaggagaagaagtcggtccctgtggagaagaagcctgccgagaagaagcccaaagcaggtaagaaggtcccggcctccaaggagggggcctctgacaagaagaagaagaggtcgaagaagtcagtggagacctacaagatctacatcttcaaggtgctgaagcaggtccatccggacatcggaatctgcagcaaggccatggggatcatgaacagcttcatcaatgatctcttcgagaagatggcacaagagttcgcccgccttggccgcttcaacaagaagaacaccattaccttccgggaga

SEQ ID NO: 2147 - DNA, 337 bp, Lilium asiatic
cggacgcgtgggatctggtggtacgattaatattctcagtggtttatctgagtgaggcctgcagctgattcgggcggtatcctcagtggtcgatccgaacttttgtaaccatttgtgtggatcgtggcgaatcgaagataggacgagatatgccttcatctttccgatcagatgagtttgatactttcagttgcgatgggttggtcttcatctattattattgatttaagaagtgatgacgttgattttttatctgatgattaggtagcatttgtatgttggcttcccaggcctttgtcatgctgggtgaccttgctcaataaatatatattctgct

SEQ ID NO: 2148 - DNA, 311 bp, Lilium asiatic
  modified_base (8)..(8): a, c, g, t, unknown, or other
tatctgantgaggcctggcggtgattctggcggtattctcagtgatcgatccgaacttttgtaaccatttgtgtggatcgtggcgaatcgaatataggacgagatatgccttcatcttttcgatcagatgagtttgatactttcacttgcgatgggttggtcttcatctattattattgatttaagaagtgatgatgttgattttttatctgatgattaggtagcatttgtatgttggcttttcatgctcttgtcatgctgggtgacctggctcaataaatatatattttgctaaaaaaaaataaaaaggg

SEQ ID NO: 2149 - DNA, 362 bp, Lilium asiatic
cggacgcgtgggctttctcactcctcatctctcccaagctgcgccagatattcgaaagagatggcttttcgcagcaagctcgggagcttgatcccctccagcaccttgaaaaactgcgtatcaaatgggccagctcccatgatgcatctgcaaaatgctgttcgccacatgtcatcaaagctttttgttggaggtctatcttatagcactgatgaccagggactgaaagcagcatttgacagctttggaaatattgttgaagccaaagttatacttgaccgagaatctggacgatctaaggggtttgggtttgtaagctacaaagaagaagggcatgccagtgctgctctgtctaacatgga

SEQ ID NO: 2150 - DNA, 291 bp, Lilium asiatic
gaccgacgcgtccgcggacgcctggcctttctcacttctcatctttttttagctgcgccagatattcgaaagagagtgcttttttcagcaagctcgggagcttgatcccctccagcaccttgaaaaactgcgtatcaaatgggccagctcccatgatgcatctgcaaaatgctgttcgccacatgtcatcaaagctttttgttggaggtctatcttatagcactgatgaccagtgactgaaaacagcatttgacagctttggaaatattgttgaagccaatgttatacttt

SEQ ID NO: 2151 - DNA, 435 bp, Lilium asiatic
ttccgatcctctcgactgattgttagcgccgccgaagatttttcacgaggtaaccattggtgcttcaggcaatttcatcatggctactcgagttaaatttgaaaactcttgtgaggttggggtcttttcaaagttaacaaatgcatattgtttggtcgcaattggaggatcagagaacttctataccatgtttgaagcagaacttgctgatattatccctgttgtcaaaacctctatagctggcacaagaatagttggacggatgtgtgcaggtaacaagaatggtcttctagtgccacacaccaccacggaccaagagcttcaacacttgaagaacactctacctgaccacgtggcggttcaacgtgtcgaggaaaggttgtcggctttgggcaattgcatagcttgcaacgaccatgttgcccttacgcacac

SEQ ID NO: 2152 - DNA, 301 bp, Lilium asiatic
ttcccatcctctctactgattgttagttccttctaacatttttcactatataaccatgcttgctttattcaatttcatcatggctactctacataaaaattttaactcttataatgttggatttttttcaaatttaacatattcatattgtttgttcataatttcatgatcatataacttttataccatgtttgaaatataacttgcttatattatcctttttgtcaaaacctctataactgtcacaagaatatttttactgatgttttcaagtaacaagaattttcttttaattttacac

SEQ ID NO: 2153 - DNA, 434 bp, Lilium asiatic
cggacgcgtggggaaggcaatgttgaggcctctggagaagatttttctgttgaaccttctgagagcaggaggcctttccgtgctctccttgatgttggtcttgtcaggacaactacaggaaatcgagtctttggtgctcttaagggagccttggatggtggtcttgatattcctcacagtgataagaggtttgctggtttcaagaaagatgacaagcaactggatgcagagattcataggaagtacatctttggaggacatgttgcctcttacatgacgtctctgattgatgaggagccagagaagtaccagactcacttttctgagttcatcaagcgggggattgatccagatcatattgaagagatgtacaagaaggtgcatgctgctatccgcgaggatccaacaatagtcaagtccaccaagccaccacc

SEQ ID NO: 2154 - DNA, 424 bp, Lilium asiatic
  modified_base (88)..(88): a, c, g, t, unknown, or other
cggacgcgtgggcggacgcgtgggcagggttatcctctggaagagatcatttattgtgctggtatccatggcctttgccagtacgcanaatcaggggaagcacggaaagtattttcggtcatgagagagcggaaactacttacggaggcaaattttattttttacgaggatttactcgatgagcacctcaagaaaacggccgcagatttggtgatctccgggttgaagttctttaacttggagtctaaattaaaactgacaagcagtgttgattaaccatataaaagaacactcagacaatcaattcaatataaaagaacactcacagactattcttcaatatgcgatcgcaattcagcctcatggcggtgatatttactgcacgttgttgcatttgctctgctataatcccaggctattgatt

SEQ ID NO: 2155 - DNA, 380 bp, Lilium asiatic
atcgggagctcatcgcaacgatggcgaaaactcgtccgggctcttacatggcaaaagctgacgagaggacaaagctaagtttcactaggtggaatgctgattggaagactgctacagttttatatgaacaagctgctattggttacagaatgaggaaagacgatgagaaagcgaaagaagcatttgagaaggcttcaaaaggacaagaaatgatttcatcgccatgggatgctgccaaacatatggagtctgctggtgctttagcgaaagaacttggccgctggaatgaagtttccgatcattacagaaaggcgtccgagttgtacaatgagtgtggaagatcacagcctgcgtcaaattctcttgcaaagggcgctcgc

SEQ ID NO: 2156 - DNA, 402 bp, Lilium asiatic
aagtaatccacactatttgtaccgcatgacaattcttcatgcgatttctctattggctgctgtcatgggcgcagacgtcacatgccagaagctattacctgtaatcattaatgcctcaaaggacagggttcccaacatcaaattcaatgttgcaaaagtattggagtcactcgtacctatagttgatcagtctgtggttgagcagacattccggccttgcctggttgagctcggtgaggatccagatgtggatgttaggtttttcgccaaccaagctcttcaagcatgtgatcaggtcatgatgtcaagttaggaagtgttattgttgaaatatgttacaagtgatgttttattttattttttcttggttaaattggccgctgacatatgatgaagatttaa

SEQ ID NO: 2157 - DNA, 367 bp, Lilium asiatic
gagcttgggaaagtatttgtgaaatattattcaactattctgagtgggagtgtgagggggtgcagcgattcgatggtccacgaatatccacttctatcgtctttcaacgtacaaatattcactgtcccagctctaaccctgaggcttgtgcgggaggtgaatctactgaaagtactattgggaggcttggcggatattttcaattcgtgtgttggggaagatgaccgcatacaggcgagtaaatgggcaaatgtctacgaatccacaattcgtgtggtccaagatacacgctttgttattaaccacagtgaaggtctcaagtatattgatgaaacccagccacatatcaaaaaaaacttggatatgt

SEQ ID NO: 2158 - DNA, 414 bp, Lilium asiatic
  modified_base (1)..(1): a, c, g, t, unknown, or other
ntccggggttttcaaattgaagaagaaagtttcagtccatttcttatgtatatgattgatatggggatgagagaagagttccaaatttttagtgaacttattaaagatcagaatcctggttctcacttcagaataggttactatgagatgctgctttggattagaattggcgatgaagataaaattcgggagctgtgtaattctattggagatactagtagtgaagacagctattactttgcagagagctatttgttggcattttgtgaaagtgacaggaaggaagagctcctgcgattgttggaagtattagacataagcagaatctcgtcatcaaagaaccttaacatgcatatttaagtccttagggaagttgcaacttgagagtatcatggaaaaagtacatcttcgcac

SEQ ID NO: 2159 - DNA, 381 bp, Lilium asiatic
gttttgagttcgccgccgctgccgctgccgttcgcaacgatggtggagaagggtagcaaggggaggaaggaggaggtggtcaccacggagtacaccgtaaacctccacaaacgcctccatggatgcaccttcaagaagatggctcctaaagctataaaagaactgaagaagttcgcacagaaggcaatggggactaatgatgtgaggattgatgtgaagctgaacaagcagatctggagcaagggaattcgaaatgtgccaaagcgcgtccgtgtgaagattgcccgcaagaagaatgaagaggaagatgctaaagaagagctctactctttggtgacggtcgctgaaatccccgcggagggtcttaaaggcctgggaaca

SEQ ID NO: 2160 - DNA, 367 bp, Lilium asiatic
gtttctggcaccagcgcaaaggaggtaatggatttgataatggtcactcagtacttcgacaccctcaaagaactcgggaactcgtcgaagaacaccactgtgttcataccccatggtcccggtcatgtgagggatattggcgaccagattcgcagtggggtgatggaggcagctgccagtaatttgcctaactagggtcgggatgcatgattttccttggactttctctgtgtttgtggatcagtttgagagtgctataagttgatatatgtagggaactaagactttcgtttgtcgaccagtttgagagtgcaataagtataggtacttaattctggtatcgagaatttattacgaggcttgacac

SEQ ID NO: 2161 - DNA, 295 bp, Lilium asiatic
ccacgcgtccgcggacgcgtgggtttcgaactcagagagagagagctgaagagatggaagggggaaagatagccaagggtgctgccggccgcaagggcggcgcaaggaagaagtcggtcccgacatccatcaaggctggcctccagtttccggtaggccgcattggccgctacctcaagaagggtcgctatgcaaagcgtgtaagctctggagctcctgtctaccttgccggcgtgctcaagtaccttgctgctgaggtgctggaactggcctccaaatgctgcccaaggacaac

SEQ ID NO: 2162 - DNA, 436 bp, Lilium asiatic
gtcatgtcagattttcccaaatttgtacaagatcatccatatggtggcgaacatttatgaggggtatgagatgatgttgcggttggagatctttttgaagatatatcatccctatatgagaagccatacgacgaaggtgtaatagttgttgtccaccggcaataagaagatgaaggtgatattcatcgacatccacgattctaagaagtactaaaaccccaagccgatgttacttatagggaatgcttcgatgggtatgacatttgacgtgttgttgaagtacttgaactcagtgttcaataatctcttgacattgggtgacatgacgttgacagagaggtcagttttttttatgggctatatgcactatcagattaacaatggtattgggctcagttagtccgtcaattcccattgaagaggtacaataacaaat

SEQ ID NO: 2163 - DNA, 352 bp, Lilium asiatic
  modified_base (233)..(233): a, c, g, t, unknown, or other
ctcacgcgtaaaaaaacgcaaaaaaatgactgaaaaatatgctagctgtgaaggtgagttctgtgtgaactttgatcggccttctgcattaaacttgccacggacttgtgcatcaggcttgccaaggagaagaatgaaacagaaaaagatgtggaaaacttggcttctgttgtcagggtggactcagttaggaaagatatgatgctgagaaacaggatgggatggatgctaanaaacagctggagaatgtgacttatgctaaccattctgatgtagtaaacactctgctgtatgacaccgacaaatatctgttgtgcacagctgctgtatgatatgagcgctttggatcact

SEQ ID NO: 2164 - DNA, 405 bp, Lilium asiatic
gtaagagcagattttcggaaaaccctaaccggcagactatcaccctcgaggtagagagcacgataccatcgacaatgtcaaagccaagatccaggataaggaggggatccctccagatcagcagagattgatttttgctggaaaacaattggaagatggcaaccctggctgattacaacattcaaaaggaatcaactcttacctggtcttgagcttaaggcgggacaatgatcaaagtgaaacgctcaccgaaggaaattgaaattgcattgaacccactgataccattgaaggatcaagagcgggttgggaaaagaaggatccacccgtgccaaaggctatctatgctggcagcaactggaaatgacagactgtcaggaatacgcattgaagtggttctgttct

SEQ ID NO: 2165 - DNA, 346 bp, Lilium asiatic
tacaaagaaatgtaccatgccgttctgttttaacattgaatggtcccaccaaaacacttaacacaaggaagtgtatgcttatattcagtggtcatcatcattgaaagccctgtggatcaacaaatataaaacggttgtcggtttaaaacttaaactgttaatatactgtgatgtttctttaaaattctcacttattttgtgttaaaaatacctaccttaatgcatatattttaaatcttccttattctgaattcaccgaattcatcttatattaaggctgactctattacattttctttatatcctcactaatttctattactttttttaaatttaatcttggtac

SEQ ID NO: 2166 - DNA, 228 bp, Lilium asiatic
  modified_base (10)..(10): a, c, g, t, unknown, or other
cccacgcgtnctcccactcgttcgcccactctttctcccacgcgtacgcctggtaccctagggcgggaattcatttcatgctctcctcatatgcccctgtaatctctgcggaaaaagcataccacgaacaactttcaatcccggagatcacaaatgctttgtttgaaccctttagcattatggccaaatgccatccaaagcattggaaatacatggcctcttgtttaa

SEQ ID NO: 2167 - DNA, 72 bp, Lilium asiatic
aaaaaaaaaaacaaccgaagaaaaaataattataaaaatcacatcaatcaaacacttttttttaacaacatc

SEQ ID NO: 2168 - DNA, 366 bp, Lilium asiatic
ggcattcatgctactataccatcacacacttaactaataaaatatctacaatgtctgcgagggaggacagatgaaatggcagcaagaagctccggagcttctccgatgagcaatctcctgaagcgaaacgtgtacatacttctatttttactttgacattctttgattgatgacattttacttttttatttattattttttttgttttgtttatatttttaattttttatttttttatattttcttatttttatttttttctatatttatttattttttgttatatatctctcatatatttaattatttttattatttataatttgttttttctttacgtttatataactttttttctattttatt

SEQ ID NO: 2169 - DNA, 382 bp, Lilium asiatic
ggtgaaggcacgatgattatctataagtgcattgcaagtacaaagaaatgtaccatcaaggctgtattgagctttgaattttcccaccaaaacacttatcacgaggaagtgtttgcttatattcagtggtcattatcattgagagccctgtggatcaacaaagaaaagatggttgttgtcctagaacttaaactgttgatatactgtgaggatagggtgaaatggtcacttattttggttgaaaaatacctaccggatggatgtatctcaagacattcgtattctgaattcaccgaaagcatggtatattaatcctgagtggaggacatagcataaaggggaacctgaatctttcatttatattaaaattgattcttgctac

SEQ ID NO: 2170 - DNA, 430 bp, Lilium asiatic
caagactcgagcaaggattgtttcttatatacggagtttccttgataatcttgattgcttggaggtagagacacctatgatgaacatgattgctggtggagcaactgccaaaccctttattactcatcacaatgatttgaacttggatttgtatatgcgcattgctcctgaactttttctaaaggagttggttgtgggtggtctggaacgtgtttatgagattggcaaacaattcaggaatgaggggattgatctgactcataatccggaatttactacatgcgagttctatatggcctttgcggactacaatgacttaatggagcttaccgagcaaatggtatcgggaatggtcaaagagttaacaggtggctataaaataaaataccatgcacatggagtggacaaagatccaattgagattgatttc

SEQ ID NO: 2171 - DNA, 374 bp, Lilium asiatic
  modified_base (321)..(321): a, c, g, t, unknown, or other
ctttcactgaccgctctagctggagagctcgatcgtcccccccgtcaatctcctcggggccgccagcagctgaaggcactgaacacaccatgagaatcagaaagaagagcggtgtcggccaggtgttcgatcaaatgcttcaacagatcgaggatcagcccgtcgagtttcagctcccggagtggtgcgagaagcaaaattcacttccctatacgacagagaaatgtggatcaggggtaatagcagaagaagatataaaacaaggggattttgtgattgaatatgtgggtgaaggtgaatgtcccttgaatatcatttcangggtaatagcagaagacgatataaacaaggggattttgtgattgaatatgtgg

SEQ ID NO: 2172 - DNA, 300 bp, Lilium asiatic
gcgtgcgcaacactctgtccaacctaacaaatcaaggtttattcccgcgtgagccccacacttttaattggcttcttctttcattcgtagacccacccccataccctcactgttccctaccctctcaccttatctactttatatccaattcactattccattttaaataaaataaaatttttaaaattaattataaaatatataaaaaatataatgggcttccactcgccatctaaaacccctcccttttttttttttttttcacaaaataaaccttatatttaataaccaattacataa

SEQ ID NO: 2173 - DNA, 274 bp, Lilium asiatic
aagctgtattataccgatacatgtggtgccatccccccatcgcctgaaaaattcccaatcttgagtttgaatcttctgaagcttcttattcagaacagaatagcagagttccacactgaactcgagcttctgtcacccagtgccttggagaacccctgcatcaagcatgcagttgagctagagcagaccttcatggaaagagcttataatcgagtcctgagtgccccgcagtctgttcctgatgaagcttatgtgtacttcatggatgtgttat

SEQ ID NO: 2174 - DNA, 358 bp, Lilium asiatic
attcttgactttgggccttaaccttaagtgtctcgtccgggcctcttgcctttccatgaaagtaccacatgtattcgagcttataggctaactgccctgaccagaatgagaattatatgtctcaggataaaggacttacgagatacaattcttcttgttttgcttaggggtcagtttgcaaaatcatagttagggcagaaggagggtctagaacagatttgataccagagtatttaccaacagacaaatatccgaccgacatctgaataaaaaactaattagcatagaaccgctgaatgagaatgaattgaattgcatcggacacagaccggaacaaaaaagttcgtagtcacttcac

SEQ ID NO: 2175 - DNA, 284 bp, Lilium asiatic
cggcccaaaccctgatctcagccgcatccatggcaccgaagcgaggcgggaaggctgctgcgccggcgaagaagaagccggagaagatcaccaatccgttgttcgagaagcgagcgaagcattttggtattggcagtgctctgacgccgaatttggatctgcacattggtgttaaactgtttattgaagagtgggttctgcgtcggctctaactcctttatgagattggcaaacaattcaagaatgaagggattgatctgactcataatacggaatttactaca

SEQ ID NO: 2176 - DNA, 276 bp, Lilium asiatic
ttataattttgtcttcttttatgcttagactccatccccctacccacacttttcccgacccgcgcaccttatctactttatatcctatgcactattccattttaaataaaataaaattttttttttttttaaataaaataaaaaaaaaaaaaattctgtcattctccatctaaaacaccccccttttttttttttttttttcaaaataaaccttattttttataacctatttcataattaaattttagtaaaacctaaattttaaatcttttttaa

SEQ ID NO: 2177 - DNA, 279 bp, Lilium asiatic
ctttgctgttgccttttacaaaaaataatcccccccaacaaaaaaaaaattctatcccttcttataataatcctgcccaaaaaaaacccaaaccatgtaaaaaagtcccctctcttcaattaattatccttttacaataaaaaaaaaaattccaataattcattttagacctacaacatctacattttcaatgttcttaaacaagtccacccctacattttaaatttcaacaaagtcattggtatcattaacaactttcattaattacctcttttaaaa

SEQ ID NO: 2178 - DNA, 136 bp, Lilium asiatic
gaagaagaagaagtcgaagaagtcagtggagacctacaagatctacatcttcaaggtgctcaagcaggtccacccggacatcggaatctccagcaaggccatggggatcatgaacagcttcatcaatgacctcttt

SEQ ID NO: 2179 - DNA, 273 bp, Lilium asiatic
cgttctttctagctagcttagaccaagctacgtagcatctattcgatgcacaaatattctcggaagaatacatagacgttgcactggtttgcatggacgcttgtcgacgacacgtggctcgatcctacaacaaaaatgctaagcctcgacatttccaagttggagactattctcaagaaggtgaggcaccgaaaaacgagttacatcccaagtggagcgggccattcatagttacagatgtactccctaatggggcataccggctgacggaca

SEQ ID NO: 2180 - DNA, 411 bp, Lilium asiatic
gaagattggcacagcgatgctggaggtctttaagcagagaggcctcgtagattagaaggtcaggccatcccattcttatgctcctagtaccaacggcactggtcctagatttgtagttctttctttgcctccaattagttcaagttcaaatgttttggttggtttgcaaccagattttcccagagactgaataagcgaatcttttacctatcctttcacagcctcgccaggctactctcgacattattggatgtcactgccttgcaacgtttttttgttgttgacattattgtaccctataacagggtggtgtttgcaaatgtaaactataatagggcggtgtttgcaaatgtgaaccaaccagattttttgagagactgaataagcgaaactcttacctatcctttcact

SEQ ID NO: 2181 - DNA, 361 bp, Lilium asiatic
  modified_base (310)..(310): a, c, g, t, unknown, or other
cctaactggaatggagaccggatccaaggccaagaacggcgccggaggccgcaggggcagcggctcaagggcgaagtcggtgactcgctcagtcaaggcggggctccacttccccgtcggaaggatcggccgctacctcaagaagggccgctatgcccagcgcgtcggatctggagctccggtctacctcgctgccgtgctggagtatctcgctgctgaagttttggaattggctggaaatgcagcccgggacaacaagaaaaaccggattgttcctcgacatgtgtgtctggcggtgaagaatgatgangagcttgggaagtttgtgggtgggggtactattgctcatggtggagtttta

SEQ ID NO: 2182 - DNA, 314 bp, Lilium asiatic
  modified_base (263)..(263): a, c, g, t, unknown, or other
  modified_base (274)..(274): a, c, g, t, unknown, or other
  modified_base (302)..(302): a, c, g, t, unknown, or other
cggacgcgtgggcggctgctgattcccaactcgtctctgattatgtccgatacttccttcatcaacacacaattcaacttgctcagcctgcaactgtcaaagtcgcggctaatttagttaggttgctggcataccagaacaagagcatgctgcagactggcctaattgttggtggatgggacacgtacgaaggaggtcaaatttactctgtgccccttggtgggacacatttgagtcagccttttacaattggaggttccggntctacgtactngtatggcttctttgatcaagtgtggaanggaagggatgag

SEQ ID NO: 2183 - DNA, 419 bp, Lilium asiatic
ccttggcggacgctcagctgacaatcacaatcatggatctcatccagcaggcggccaattagaagcagctgaagaaaggagcaaatgaagcaacgaagactttgaacaggggaatctcggagtttgttgtgatggcggctgatactgagccgcttgaaatccttctccatctccccttacttgccgaggataagaatgtgccttatgtcttcgttccatcaaaacaagctcttggtcgggcttgcggagtgacaaggcctgtgattgcttgttcagtaactagcaatgaaggcagccagctcaaatcacagatacaccaactcaaggatgcaattgagaagctgctgatctgattacagaagaaggttcagcatgatgggctccaaacaaggatttgaagcttggactgatgaatttac

SEQ ID NO: 2184 - DNA, 305 bp, Lilium asiatic
  modified_base (279)..(279): a, c, g, t, unknown, or other
agctcctgggaagaagcctgcaccggttgctgcaaagaagccgaagtcagtgaaaaaagctgcagcggctaagaaggctccgttggccaaaaaagctacggtggtgaagaaagctaaggctgcgaaatagatgcgtttcccttttattcaattgactgtcagtttatttttcatataggcgggtagtcagttgtaaatttattaactgtaggggtgtgttagtgttatttgtttgcttatgttaatggaaaggcttgtttactttctaaaaaataaaanactaacaaaaaaaaaaaataaataaa

SEQ ID NO: 2185 - DNA, 302 bp, Lilium asiatic
aaattatagagaagcccttattgaaactaaagaagatgaagatgaaggagctgacattctgtgggttaaaccagcgatgccctatctggatgttattcgtcttcttcgagataattctgcacttcccatagctgcatatcaggtttctggtgagtactccatgatcaaagctggcggtgttctgaaaatgatagacgaagagaaggtcatgatggagtccctgtattccatcagacgcgccggtgcagacatcatcctctcatatttcgctcgccaagctgccacccatttgtgtggaatga

SEQ ID NO: 2186 - DNA, 306 bp, Lilium asiatic
tctcgccagagccagtttgttcaaggcttttctggtttgaaaacagtctcggtcaacagtcagattaaaaactttccatcacttcaatcacagcgcttccgtgtttcctgtgctgccaatgtcgagactgctcacaaggtatgcgagattgagaggaaacattttgctctttaagacgatactcctgcttctggttaatccaagttttcagattttgggactaaatcttttgacactgttagacattgcatgggtcttgaggtaactttagagatctctgaataagaggtcaacgcatataacaca

SEQ ID NO: 2187 - DNA, 498 bp, Lilium asiatic
  modified_base (23)..(23): a, c, g, t, unknown, or other
  modified_base (79)..(81): a, c, g, t, unknown, or other
  modified_base (157)..(158): a, c, g, t, unknown, or other
  modified_base (164)..(165): a, c, g, t, unknown, or other
  modified_base (196)..(197): a, c, g, t, unknown, or other
  modified_base (258)..(258): a, c, g, t, unknown, or other
  modified_base (287)..(288): a, c, g, t, unknown, or other
  modified_base (313)..(314): a, c, g, t, unknown, or other
  modified_base (490)..(490): a, c, g, t, unknown, or other
gaagaaccgggcgcgacgccacnggcgtccggtaccaaagcaagaagattgtatagtcgaggcatgtatacagcattgnnngcaggagccatcggaggaacccagggatcgttgttaacagaggcatgtggtgaccattgcggaccgatcatttgtnngaatgnnctgaagaaagagtgaaaagctctcgcttggnnagccccattgcggtacccacttctttcaagaagcctatccggtatggaatgagaaaaaacnaacttagcccgggtaaaatcaatctgatnngggagggatgcgttatgaccaatcnntacattaccatgctgccgcttcttccaagcaccgagaacagcattgatgattcacgtgcaggacgacctgatcgttcagagagggaccataaaaggcagcggcaggagaattaggtctgatatgtaaggagagagatctttttcttatagtttttattactgcagtaaattattgngatggttt

SEQ ID NO: 2188 - DNA, 415 bp, Lilium asiatic
accgatttcagggattcatgcgcatccacccctgattacatgaaggattcttactggagtggtataagtactgttaacaactctgagcaagggcacgtatccaaagaccttacacagcaaaagaccaagaagaagttagactcggcccggcatctacaatttggagctgcaagtccaaacatgaaaccagcattagcaacggaaaggccaattatcaccgtggaagagaaacttgtggacacaccgactgcgctgatactgaattttaattcggtagaatctcttccttctgaagctgatcttatcaagatttttggtggatacgggcctctgaaggacacacagatagaagttatgacgaagattaaccgtgctaaagtagtttttaagcgacgcgctgatgcagaaatagctt

SEQ ID NO: 2189 - DNA, 288 bp, Lilium asiatic
gacccacgcgtgcgcaccagcacatagactcattctgttaatattatgaaacagccactaccattttgagggctgaaggagttattcaatattttgcactaaacaatgcaaagtccgattcatagtgcacttatcatagctgcatattatgatactaagaaatactctataactaaaactaaagcagataataaacattatatactaacatacatgccatatcattctcccgtcatacatcatactcgcccttgcttacataataacataataaatggaaagcaaaat

SEQ ID NO: 2190 - DNA, 191 bp, Lilium asiatic
ttctaatacacacactcctacaacaccccaaaacactcttaaacaaacaaacaaatatcctcctccagttaataccaaacttcagctttctttaaaaaactcttaaaacctcatcatcacattccgcacttttcaatatacttatatatttaaatactgaaaataataacaattttaacatattttaaact

SEQ ID NO: 2191 - DNA, 413 bp, Lilium asiatic
aaattatagagaagcccttattgaaactaaagaagatgaagatgaaggagctgacattctgtgggttgaaccagcgatgccctatctggatgttattcgtcttcttcgagataattctgcacttcccatagctgcatatcaggtttctggtgagtactccatgatcaaagctggcggtgttctgaaaatgatagacgaagagaaggtcatgatggagtccctgtattccatcagacgcgccggtgcagacatcatcctctcatatttcgctcgccaagctgccacccatttgtgtggaatgagatgaagtcgagcactgtctaccagtcccattgcaatcttaatcaagaggattcatgtgattattttttcactccctgtatctgcaattatttataaaatttgtcatgctc

SEQ ID NO: 2192 - DNA, 404 bp, Lilium asiatic
gaccacgcgtccgaccgatttcagggattcatgcgcatccacccttgattacatgaaggattcttactggagtggtataagtactgttaacaactctgagcaagggcacgtatccaaagaccttacacagcaaaagaccaagaagaagttagactcggcccggcatctacaatttggagctgcaagtccaaacatgaaaccagcattagcaacggaaaggccaattatcaccgtggaagagaaacttgtggacacaccgactgcgctgatactgaattttaattcggtagaatctcttccttctgaagctgatcttatcaagatttttggtggatactggcctctgaaggacacacagatagaagttatgacgaagattaaccgtgctaaagtagttttcaagc

SEQ ID NO: 2193 - DNA, 337 bp, Lilium asiatic
cggggtgaagccctctacagcatccacttctcagggcagcagttcacgtcaaacgagcggggggctcgtatttggttcgaatgcaaatgctccgaaagcacaacaaaaggctggtaaagaaacgaacgaagagcctccgaagagtgaagagccaaagtttcaggcgtttactgggaagaagtactctttaaggggctgatcatgacatcccgcactgttcaatatggttagatatttaaatagtgaaaataataacattgtggacatattttaaacttgtttcaaatgggtatgtataccgtctaaggttttcatatttagaaaccaagtacacttt

SEQ ID NO: 2194 - DNA, 417 bp, Lilium asiatic
cttagaagcgttggatgcagcaacagccgagaagcgtgctgctgagattgggtttggacttggttttaccaagcaaatgcaagctaagaaaacccgggacttttctggtggatggcgaatgaggattgcactagcacgagcactgtttatgaacccaactattcttctacttgatgagcctacaaatcatctggatcttgaagcgtgtgtctggttggaagaaatgttaaagaaatttgagcgaatccttgtagtggtatctcactctcaagattttctcaatggggtctgcacaaatatcatacacatgcagaacaagaagctcaagttctacaccggtaactatgaccagtatgtccagacccggtcagagcttgaggagaatcaaatgaaacagtacaagtgggaacaggagca

SEQ ID NO: 2195 - DNA, 283 bp, Lilium asiatic
attagatacaccatacacattatcaatagttgtattcattgaaggacactcgaggaatggggggacattatatgaattatgtgccatggcagccatagcacatcagaggtgtgatggtaaaaccaaatatgagcaccctaattagatggagcactatggtctagcctagactgtaaataacaactccaaaagggcacaatcatgacatattcaaatgtataatatatgatgatatattagtagtcctcgtacatgcatttcagtcttacattgagcatatttt

SEQ ID NO: 2196 - DNA, 386 bp, Lilium asiatic
cagctgatggttttcctctggcttctgtactttctcattacgtcggaatctggtggtgggacggatcaggttgtggggatgctaccaatgtcgaaatctatgagggaacggtgtgtacaggttattgaccatgcaattgggagtgtgcttttggcaacggctaagattgcgatgttccagggttgcctgacatggctattgttcagactctgctctgtgcatttcgtgtacatgtcgactgctcttgctttcatcagtccgttgttgccactactccctacttggttgtcctcggttcctgcattgttgcagctattaatggaaggaaggtacatctgggctattggattagctgtgcttcaccttatgcttatggattatggcac

SEQ ID NO: 2197 - DNA, 418 bp, Lilium asiatic
  modified_base (103)..(103): a, c, g, t, unknown, or other
gaagaagggcgcgacccacgcatccgcatttgcaggccctcccttttatattttttcccccacatacaccaacctaagcccactgttaccttatcagatttcntctctcacaccatccctgaaagttagatggtaccctgaatgtcaatgtcacagacctccagaccaatcttgtcccctacccaacgattcacttcatgctttcttcctattcaccgactatctcttcttaaaaagcataccatgagcaactttctgttgcttacatcacaaacacttcttttgagccttcttcaatgatcgctacatgtgaccctcgccatggcaagtacatggcctgcttcctcatgtatcgttgagatatgttccccaaagatttcaatgcttccctttccaccatcaataccaaacgcaccat

SEQ ID NO: 2198 - DNA, 298 bp, Lilium asiatic
ccggggcgacccacgcgtgcgctccaataatatctctactcaatttacatcttctaccatcatttcaaaccaatggtgcgtggagccagtattcttttttactaccaaaactttcactttactaaataaccatcccttgcccaacatcgaatagactttgaccattgtagacaccaacattcatgcggcttctttacaaaagtcttttttaaaacccttttcataacatgatgaacttctcaatatgtatatatattacaatattgaaaataataacattttacacatattttaaact

SEQ ID NO: 2199 - DNA, 403 bp, Lilium asiatic
gctgcagaatattggacattgaagtcgaaatcccacagtcaacttgctttaaggcgcaaaagaggaggcatttatgcttggaacaaccaaggcgagaccaaacaataaagaatttgagctctatattacgacggcaccaattccagacttaactgagaaactaatcgtgtttggccgggtcctcaagggaaaagatgtagttcaagaaatctaataagtcgacacacatgagcactaccgaccgaagtcccctgttgggatcattgatgtcacattgaagcaggatctttgaagagcgatacccgcattgtaaggaatttattggagctcgacacagggattacttttatggtcgaagtgagttttagggtttgagttaaagtaaaaaaaaattgatgagcta

SEQ ID NO: 2200 - DNA, 231 bp, Lilium asiatic
cggacgcgttgtctgactctttgtctgacttttttgataaaaaaaaaaaaaaaaaacaagtgtaaattgtaaaatttaaaaaaaaatacaatcaaaatattcactatttttgtttcacctctctttgacccaccttttcttcaccttgaccttgtagttttacttcttttttagtcggacttaaaaaaatttattttccaacccttttccaatctgattatgattttattt

SEQ ID NO: 2201 - DNA, 407 bp, Lilium asiatic
ctccaatactatgagatctcagcatagagcacctccaattttgaaaaccttttgtgtattgtgccagaaagcttgctggccatcaaaatcttcactttgttgagtcaccagcccttgccccaacttgaggttaaaattgaccttgtggaccaccaccaccttgaggcgaatttccaaagggctatgttgcaaccccttccggatgatgatgatgatctcattgagtaggtgtgaaacttcttggtctggagagatggttaacctttgctgagttgtgggagagatgatctgacttttggtggttggatcttttctagtatattttgtagcgctgcatttaggagttatttggtggtactcttgtgtgttggaaaacctagttctggtttatgtgtctggtcctgttt

SEQ ID NO: 2202 - DNA, 425 bp, Lilium asiatic
  modified_base (106)..(106): a, c, g, t, unknown, or other
ggggcgacccacgcgtgcgaagagcatggacatgctcttgaattttggtttcgtgttgaaaacatcaatgctgttgcaagatggactaaaaacttatgcgccaatntatctcaaggttcaagcatatctgagaacaccaattcttaacctaactctggtgatacttcgaacgctttgtccacttggagcgtacttgacctctgaactggaaaccgtctgctactgcaagagctagcaaagcaagggttttccgatttgactggaactgattatagtgaacgcgcaataacccttgctcggaaccttgctgctcgtgatggatttcccaatatcaacttcttggttgatgatgttctggagacaaaattagacagaaaattccgtcttatcatggacaaaggaactttagatgccattgggttgca

SEQ ID NO: 2203 - DNA, 355 bp, Lilium asiatic
  modified_base (17)..(17): a, c, g, t, unknown, or other
ggggggggggggggggnaagcatggccatgctcgtgaattttggttttgtgttgaagtcataaatgctggtgcatgatggactaaaaacttatgccccaatgtatctcaaggttcaagcatatctgagaacaccaattctgaacctaactctggtgatacttcgaacgctttgtccagttggagcgtacttgacctctgaactggaaacggtctgctactgcaagagctagcaaagcaagggttttccgatttgactggaactgattatagtgaacgcgcaataacccttgctcggaaccttgctgctcgtgatggattttccaatatcaacttcttggttgatgatgttcttga

SEQ ID NO: 2204 - DNA, 427 bp, Lilium asiatic
  modified_base (349)..(349): a, c, g, t, unknown, or other
  modified_base (384)..(385): a, c, g, t, unknown, or other
cccacgcgtccgcggacgcgtgggtgttgctccgattgttttggtgactgtgtggctggaccaatcccttgttcatgcacacgagagactggaggtgagtttgtgtacactccagatggcttgctgaaagagaaatttctggatgaacacatctctatgaatgataatccagagaggcataaacttttttactgtgagagctgtcctttagaacggataaggaatgaggttttacctgataaatgcaagggacacttgattcggaaatttattaaagaatgttggagtaagtgtggatgccacaaacattgtggaaaccgcgtggtgcaacgaggcataacacgcaatntggaggttttctatactggagagaaaaagggctgnngtgtgcgcacccttgattatttgcccaaaggtgcttttgtct

SEQ ID NO: 2205 - DNA, 416 bp, Lilium asiatic
  modified_base (370)..(370): a, c, g, t, unknown, or other
cggacgcgtgggcggacgcgtgggcggacgcgtgggtgggtatccggccatcaccggtgggggcggcgttctcctccagagggcccaacatattgacactcgaagttctgaaacctgacttggtggctccgggagtgaacatactagccgcatggaccgggctcaccagtccatctagcttggctagtgatccccggcgcgtcggcttcaacatcttgtcggggacgtcgatgtcatgcccgcacgttgccggcatcgccgcattgatcaaggccagccatccaaattggagcccggctgcaatcaagtcggctctcatgacaactgcctatgtgcatgacaatacttatcgcccactcaaagacgccgncaccggcagcccctcaacaccgtatgatcatggtgctggccatata

SEQ ID NO: 2206 - DNA, 403 bp, Lilium asiatic
agcacttgcaggtgttgtttcattggcagaatcagaagtgggccagtctaagatgatggaggattatgcttcgacgagaaacatgttgacactgacgagtatagaagtcctgtggcaactacggcttcagtagtacgtggcgtaactgcattttctgaagttatttccggaaagctaaatattccgggcgacaaaatattaggcctggctagattcttcctaagcattggagttcctggtagcactaaggatttcttcgatcagatagaatccctttcgtgcttggagaacaataggcatgtgtatcagcaaatgtcatggatacaaggaaaaatgatgatgccgaattcacctatggttccggccacattaacccggtaagggcagtcgatcctggcctagt

SEQ ID NO: 2207 - DNA, 387 bp, Lilium asiatic
cggacgcgtgggcaagcttcgcctcttcgttccaaagcccttgttagtccccgggtcaccgctcttctcaccttttcgtacaaatgctcccacctccgccgacaatcaccaactgctctgacaaatccgccaaccctgctcccctctgcggctccgagaagtttctagcactcttctttgcttaattgaagttttaattgaggattaatttggattcttctcgtttgattgcaggacgcggagcgtgcctagcgtgtgcgggagggagttgctggcctataaatagaggcgaggaggaattgttgagagtactctcccgtctgagacacttcatgaagctctaagctccaatgccaaatctcgagcaactgtccttgccggagtcgc

SEQ ID NO: 2208 - DNA, 289 bp, Lilium asiatic
gttgtaggtcctcttccaaccattcctcatttgcatggagtctcctggtatccgtgagacgacatacaactccatcatgaagtgtgacgtggatatcaggaaggatctgtacggtaacattgtcctcagtggaggatcgaccatgttccctggaattgctgaccgtatgagcaaggaaatcacagcgctcgcccccagcagcatgaagattaaggtggttgctccacccgagcgcaagtacagtgtctggatcggaggatccatccttgcttcgctcagcactttccag

SEQ ID NO: 2209 - DNA, 329 bp, Lilium asiatic
ctattacttgctgattcaattttgttttaacttgcaattggaattattgcataccattttgatgtttgaaaaaaaaaaaaaaaaaaaaaaaaaaaaaaaaaaaaaaaaaaaaaaaaataaaaaaaaaaaaaaaaaaaattatttaacataaaatactccatgcataacttactctttcattcaacaaaaaaaattttatttgttcctacataaataaaattcattttgaaaaaatactataactttccaaatttaaaaaaactttgagtaaacaaaacatttcttcccattacagtaaataattcatatgccaatacttcattcttttt

SEQ ID NO: 2210 - DNA, 241 bp, Lilium asiatic
  modified_base (9)..(10): a, c, g, t, unknown, or other
accaaaaannccattaaaacactacaaaatatagtatcattctttatttaaccccatctaaatgttacaaaaaattctcattctttttttcgttaatttaacccttaaacacatcattttcttcatatatattcggatattaaaaaaaaaaaaatctcaactataaccgtacttaaatatacattccatagaaaaccgaacaaaatccctacatacaacaaccaataaaaatttcttctac

SEQ ID NO: 2211 - DNA, 301 bp, Lilium asiatic
gccgacccacgcatcctttaaaaaaaaaaaaaaattttaacaatttttaacaaaccaaaaaaaggggaaaatgtacttttaaaaaaaccacaaaacccccaccaaaaatttctaccaaaacaacatgccccgcctctctaaaaaatccaatcctacctcccccccctttcaacattataaatcttattatttccccctatattaaaaaaaccgccccgtccttaacaacttctttactaaaaaaaccctttccttccccaacttaaatctctttcacacacatcccctttttcacattttt

SEQ ID NO: 2212 - DNA, 388 bp, Lilium asiatic
cccacgcgtccgcacacccggacctccagtcgagctctattttcataactgatgactacgcgcggaaagagtgcggacttgagtatttggaaggaggtagttgccaaaggaaaaatatctggggatgacgaaatagatctttctcagttcccttgtgcctctcctgaaaatgatgtatacaacttcggtatattgctgttagaaattatatctggaaaagttccatatcccgatgaacaaggctcaattctaagttgggctatggaatacttgaacgataaaagcagattcggttcattgactgatccttcgctaaagcttgtcaacgacaacgaactggaggctgtatgtgatgtcattcgagattgtattaatcaggatccacata

SEQ ID NO: 2213 - DNA, 299 bp, Lilium asiatic
tgccagtcaaaagacaagaagtccttgagccgtgccgagatgctactaattggggctctcgcaggttttactgcaagcaccctcagctttccgctggaggttgctaggaagcgactgatggtcggggcgctgctggggaagtgtccgcccaacatggcggcagctttgtcagaggttgtgcgggaggagggtttgatgggtctctaccgaggatggggtgctagttgcttgaaggtcatgccttcgtccggcattacatggatgttctatgaagcatggaatgatattttgctggtcta

SEQ ID NO: 2214 - DNA, 157 bp, Lilium asiatic
gtgacagtgtgattggcatgatatgcaactctttttctcagactctatcaaggcttctccgggctctcggtgctaacattactttaagtgggatacaatttgctcctgcccaattgccatttcttcagttaattgactgttgtattagcatacagga

SEQ ID NO: 2215 - DNA, 417 bp, Lilium asiatic
aaaagttccagggctgagctgatgatgccccatgcttcctttatgctgcacttgacagaggcgggcttcaaggataagtctagggatgagtcattgactaaagcaacggttgccgcattgggtgaccttgcagatgcgcttggttccaacacaaagatcttgtttaaagattgtactttccatattgagttcattagcgaatgtttccagtcccatgacaaacagctgaaggagactgcgttatggactgatggaatgatcacgcgtgttatggtttcgtaagatgaattatcatttgtcttctggttatagttgcccttaaaaattaattctgttagtgtcaaggtacctggctgagtattttatatatgaaactgctcacaatgggtccttttttgagatgactggtggtttttt

SEQ ID NO: 2216 - DNA, 291 bp, Lilium asiatic
atttgacaaggtcttgctcagttttttgtgctctcatgcctgagttgactttgtgtttccgtcacatttatatttctgtcacatcttctgcatttgttgatgcaatggcattatttttacagagagggaaccctcgttttgcacagctaaataatgctgtatttggacttttctattgtggctatctaccgtgtttctggatcaagcttcgatgtggtctgcaagtccctgctttaaatactcaatttggaaacatcttgccccattctcttggccggcaaaattcatttg

SEQ ID NO: 2217 - DNA, 365 bp, Lilium asiatic
  modified_base (90)..(90): a, c, g, t, unknown, or other
tggaggaaattgtgagaagttctatgaataaactagcccagggaatggcaggatacatggagtcattgtctaaagccaagaccgactaanaaaaggccaagataaaagcggagcagcagaaatcaacaaattcccagcggttgtgtcataacatactggctatggcccagccgttgcactcaaaagccccttcatttattggcgataaaaggatcaccccatcgtgggaactggctaaatcttcttcatcaactgctgcaggaggcggcaagcgtgcggcgcctgcattcaatggttcaagtgctaatgctccccccttcaaaagagggcgtggtgatcgtggcacccaaaatctggctgtgaac

SEQ ID NO: 2218 - DNA, 300 bp, Lilium asiatic
atttgacaagggcttgctcggttatttgtgctctcatgcctgtgttgactttgggtttcggtgacatggatatttctgtgacatcttctgcatttgttgttgcaatggcattatttttacagagagggaaccctcgttttgcacagctaagtaatgctgtatttggacttttctattgtggctatctaccgtgtttctggatcaagcttcgatgtggtctgcaagtccctgctttaaatactcagttgggaaacatctggcccattcttctcggcgggcaaattcattggactgttggcc

SEQ ID NO: 2219 - DNA, 380 bp, Lilium asiatic
  modified_base (1)..(1): a, c, g, t, unknown, or other
ncagaaaaatacatggctcctcttcgtctatatgttcccatttttagagacgagaagacacgctagcttcattagatgaacttgctccacttaagggtcattcatcaaggttagcggcactcgattatactgtctgtgctcacagtgaagtatttctcacaactcaaggaggaaactttcctcacttcttaatgggtcacaggcgatatctttatggagggcattcgaggactatcataccggacaaaagaaaattgatgctatctcttgacaaccccaatatcacatgggataggttcaagcataaagtgcacgagatgcttgtaaccatcgatttaaaaggagtcgccgctcgaaaaccaaatgcatcactatacacc

SEQ ID NO: 2220 - DNA, 379 bp, Lilium asiatic
  modified_base (257)..(257): a, c, g, t, unknown, or other
actttgtttgttgatctaattaatggatgtgctgccccagctgattattcgattaacaagcatagttgtacgatgggatactatcttgctagtgatgtatatccgccgtggtctacggttgtaaaaacaaactcagaggctagaaacaataggataaggcattttgatgcgtgtcacgagtcggcaaggaaggatgtagagcgagcatttgaggtactccagtcacgatttgcatttgtgcgtggaccgccccgttnttggcagcatgaaacactgaagcatatcctgtcggtatgcattataatacataatatgatccgttgaaaatgagcgggatactatggattgggatttcaattacaatgagctcgatgaaaat

SEQ ID NO: 2221 - DNA, 280 bp, Lilium asiatic
tgataatgggttttatattggaactaggacttctgcaggctgtttttagcttcattaccaggcaactgcagttatgtgcagttttctttacattttcgcttggaactagaacacattattttggacgcacaattcttcatggaggtgccaaatataaagcaactggcagaggttttgttgttagtcatatcagattcgctgaaaattataggatatattcacggagccattttgtcaaagcgctcgaagttgcgctgcttctcattgtctacatagccta

SEQ ID NO: 2222 - DNA, 196 bp, Lilium asiatic
gcgcgtacacctaatccaaacttgttctaggtgtatatgtggcttgctaaaaacatgcgtagttgtgcgactctatactatttccctcatgaaacatatcctcctgggtctacgatcgaaaaaacactctctgaccctataatcagtgggattatagcattccgattcctcctaccactttcaataataagatgtt

SEQ ID NO: 2223 - DNA, 205 bp, Lilium asiatic
  modified_base (52)..(52): a, c, g, t, unknown, or other
  modified_base (60)..(60): a, c, g, t, unknown, or other
cgaggaagcgcaaggccggggaggccgaggttttgcggctgcgacgtcgtancgatgcanccgccgctggctgaggcggcgccgtcggttggggagggatccaattcgagcccgaaccccgatccggacctcaactccgtgctcatcccggaggacaactacgactggtcctgctaccgggacgacgaagtcatgcagcagcagt

SEQ ID NO: 2224 - DNA, 168 bp, Lilium asiatic
  modified_base (43)..(43): a, c, g, t, unknown, or other
  modified_base (89)..(89): a, c, g, t, unknown, or other
  modified_base (97)..(97): a, c, g, t, unknown, or other
tgatgacctaattaatgaatgttctgccctatctgattattcnattaacaagggtagttgtacgattttatactatcttgctagtgatntatatccnccgcggtctacgcttgtaaaaacaaactcataggctataaacaatatgataaggcatttttatgcctgtca

SEQ ID NO: 2225 - DNA, 347 bp, Lilium asiatic
cggacgcgtgggcggacgcgttttatagaatagtttctgtcgcaactttcagggtcttttgtgacaagttagccgaaatgccatttattggtactcgtcctaaatatcgctttcaaggcatgtgccaccttcttgttgatgagctgagcaagctgctgtctgaattaggagtggaaaggctaatcttgccagcgacaaatgagactgtggataaatggctaacgaaatttaggttcactgtgatgacatggtctgacttgtcagagttgtcgcggtacagatttatcacttttgcaagccttcacatgtgtcagaaagtactaaggggatctaccacttcacaagat

SEQ ID NO: 2226 - DNA, 412 bp, Lilium asiatic
  modified_base (299)..(299): a, c, g, t, unknown, or other
  modified_base (351)..(351): a, c, g, t, unknown, or other
gcggtccagcacccgcgagtttcaagcggagagctctccgattccagcccgtcaagttgggttccctctcaggttctctcgatggccgtgctcgacaaagtccggcggctgttaaggaagaaggggttcgagagggatgatatctacttctggaagcagatggggaaggcggtggtctgcacctacactatctttgggcttgcttggttgtggaacgagacgtcgccgctcgggtggtggaccctcaagcctcgccccaaggaagagaaggagatggcacacttgtatgagcgcagaanatttccatacccaggtgacactgaggctgtcgaagagttcattgcaagcggnggcgcccttggcaccaccattcgtcccaaagggattatcgactctggcgattctgacaact

SEQ ID NO: 2227 - DNA, 387 bp, Lilium asiatic
caaagccctacttttcaacctaactggtttggagaccgcatccaaggccaggaagggcgccggatgccgcaagggcagcggctcaagggcgaagtcggtgactcgctcagtcaaggcggggctccagttccccgtcggaaggatcggccgctacctcaagaagggccgctatgcccagcgcgtcgcatctggagctccggtctacctcgctgccgtgctggagtatctcgctgctgaggttttggaattggctggaaatgcagcccgggacaacaagaagaaccggattgttcctcgacatgtgtgtctggcggtgaggaatgatgaggagcttgggaggttgttgggtggggttactattgctcatggtggagttttacccagcat

SEQ ID NO: 2228 - DNA, 320 bp, Lilium asiatic
caacgacatcacccctcagtataattgaaaccttctatacatgaacgctcccaaagaccaaacagaaaaagatcgcattcaaacaaccaataatctaagaagacacccttactatacattacctaaaactaaattctctacacacattcatgatacataagttgagacttcaaaaacaatgaaaaaaaacacccctctcaaaattgtcactcactacaaaaatatcaaaaacttgaacacattaatacgacctcatcaccaacaaaagatactcttctacacattatcacctcaactaccacccaagcaaagacacctat

SEQ ID NO: 2229 - DNA, 200 bp, Lilium asiatic
  modified_base (16)..(16): a, c, g, t, unknown, or other
  modified_base (19)..(19): a, c, g, t, unknown, or other
ggccgacccacgcgtncgnttccagattacattcttcaacttcccacttatttcatgaacagcccaataccgcctatcgtattacttattattcacctccttccaaacaacaattatattccgttctcttcctcaagctacccaatctcagactcctttctccttagccatagctgttttcatttcctttaacatttcat

SEQ ID NO: 2230 - DNA, 242 bp, Lilium asiatic
  modified_base (9)..(9): a, c, g, t, unknown, or other
aaaacaacnacaaatgcgacccccgatggattacacattattcaaaatccctaccttttgatccatcaaaccatgactcttacaaaaaaaaaacacctctaatgtacagttttaccatacaatatatattctcaaaatatactatcttataaccttagccatccaaaaagcacttgagtctttggagccccttttcttatattctccgtcaaactttactccttttcactataaccttatct

SEQ ID NO: 2231 - DNA, 416 bp, Lilium asiatic
taactaaataaaagaccatctttaagttctagaaagaggatggtaatgcggagcgtcttgagtgcaatggagaagttgcgactgaagcctcaattggttcgcccaaaaaaggggtgttgccagatagtaagaagaggaaagttcatgtagtggatggtggtaatgctgcagcgcatcaactgaaagtctgcaagatgaataaacatgttgctgatagtgctgacaaggttaacaaaaatgtatcagagaatgagatcgatcttaattttcccctgaaagaggagtcaccggatgatcctgaaatgggattgttgactgatgggagcaaagacaaacctttgccgaaagttcgcaaaccgaggaagtgcaatgagcctgatgttgaagatgttgttttgccacaacgtactcctttg

SEQ ID NO: 2232 - DNA, 447 bp, Lilium asiatic
gggggacccacgcgtccgcaggacgaggcaagggagggaaggggctgggcaagggcggcgccaagcgcgccgcagtggctccgggataacatccagggcatcaccaagccggcgatccgccgtctcgctcggcgcggcggcgtgaagaggatcagcggtctcatctacgaggagacccgcggggtgctcaagatctttcttgagaacgtcatccgcgatgctgtcacctataccgagcatgcccgccggaagacggtgacggcgatggatgttgtgtatgcactcaagcgccaggggcgaactctgtacggcttcggcggctgaagggatgaggtttggtccaggactagggtttctgctttggcttagttgttgttggctgtctttgtagtatggtagggtttgtggagcgcgacttgtaagattgtcagatatcttatctgatat

SEQ ID NO: 2233 - DNA, 283 bp, Lilium asiatic
aacaagaagaggggttgccgaggtgcctaatttcaacacagttcatcacaaagattactatgcatttcgtcaatgacatacggaacccaattacaaggtttgcagcacttcttgaggaaaaccaaatggagaggtccagccagttggaaacttttgcaaggacattcaaggagttgtcagctaacgaggaaaaggcagccctagaaaaaattgcggggatattaacaaaattgacaaacacaaaagcaaccatggtctacaaagccttggagaacttaaatga

SEQ ID NO: 2234 - DNA, 385 bp, Lilium asiatic
  modified_base (70)..(70): a, c, g, t, unknown, or other
cggacgcgtgggtccggcccgagtgggggagggcacattgttggccgtctttcgctcggtgttggaggangcacattgggagagcatctacaagtgatttcggagtagagagttcatcatggttcttgtttgtgggtctttgttgagctttgagagagtcatgtaagtggagtttgtaaggtttgagtcttattttatgatgagtttttggttcggatttgtatacattcaaggatggccaaggcctagaatgggatttgagttcttgtgttgatcttccattgtagtttatttaaactttcatcaatgaaatgcttttattgttcatctttgtcaaaatcattcaaacccgagagtgcaaatcactctttcatctttgatgggt

SEQ ID NO: 2235 - DNA, 267 bp, Lilium asiatic
aacacgaaaaggtgttgccgaagcttcctaatttcaacacagttcatcacaaagaggactatgtattttttcaatgacatacagaacctaattacaaggtttgcatctcttcttgaggaaaaccaaatctttagcaacatcccactgataacttttgcaaggacattcatggaacttttatcttacaaggaaaaggctgccctataaaaaattgcaggcatattaacaaaattgacaaacacaaatgcttccattttctacaaagcc

SEQ ID NO: 2236 - DNA, 293 bp, Lilium asiatic
ggccgacccacgcgtgcgcggacgcgtggtctgactcctattctgatttctacctggtggggctgtttgacgacacctgcctgtgttccatccatgctaaaagagtgactatcatgcctaatgacatccagctcgctaggaggatcctcggcgagagggcttgatttgtttctaatttgctactcgcgaaaatgttgggaaagcttgatttgtttctaatttgctactcgcgaaaatgttgggaaagggtttctattatctttattgtaatttggtggattaaccttgttatc

SEQ ID NO: 2237 - DNA, 345 bp, Lilium asiatic
  modified_base (14)..(14): a, c, g, t, unknown, or other
  modified_base (25)..(25): a, c, g, t, unknown, or other
  modified_base (72)..(72): a, c, g, t, unknown, or other
attttgaattttantactgtaatgntccaccaggccttttgtacatttaatactgccccatcccctacaacngcttcccccccaagaaaccctgctactgcctctacgcctgctgcgagaaccacaacgcctgcattcatgctcaccacaatgagtattttatccatgagtgcaacaacaaatttctttactttatttatgccctgagggaatccccttcgccaaccttcaatgtcaacaaatgcatttttgatgaagtgatttaccttatttatctcctcatctaagcggcgctctttgcccgaaaggttcttcaccccccttatattgatgattggattcttt

SEQ ID NO: 2238 - DNA, 414 bp, Lilium asiatic
  modified_base (404)..(404): a, c, g, t, unknown, or other
cacgcgtgcgcgccactcggactcgaacctagatgctctagcactgcttcctaagaacagggtgtctagcaatttcaccatggcggcttattttaaatattaataaataatagtcaattcatgttgaatggttaagattcaaggaatcaatatagttagtaaacgttagaaccgatgaaaaaagacttatttaaattaatatttgaatgtttactaagtattgccgtggggtttagctttaagaatcaactttcatgtatctagtttagaatgtaaaaatggagttataccaaaacagtcagaactagatagttttgttccgggccaagggtcgagttatagaactaaaaataatcctttttttagatgattttttaatttgaattaatgtattgaaaattaanaagattaatt

SEQ ID NO: 2239 - DNA, 274 bp, Lilium asiatic
gaccacgcggcccggctctttaactactcttaaacctacttttcccctttttctagatccccatctaccggccttttgtttttttttttaactcaaccctaaactacatattactcccaatatctcaacaaaatcattcttttctcttacaatatcacaccaataattttctaaaataactcctaaaaacatatgttttcacaatcatcatttctttcattactatttacataccttccctataagatataaattaatatcctctattttcttc

SEQ ID NO: 2240 - DNA, 386 bp, Lilium asiatic
gctggttgctgcctgtcttgttatgctttcttggtgatcttgttgatcctcattgagctgggagctggggctttcatattcttcgaccatagttggaaagatgtgattccggctgacaaaactggggactttgacatgatatataattttctggaggcaaactggaagattgcaaaatgggttgctctgggtgtgatcatattggaggcattagtattcctgctagctattctggtgagagcagcaaataaacccgcggactatgacagtgatgacgaatttatcgccactcgatcgggtgttcgccagccattgatcaacatgccatgagctccagcaaccggagtacctgtgcccaccctcgattcacgttcgagcaggactga

SEQ ID NO: 2241 - DNA, 390 bp, Lilium asiatic
cctaggcccaatttcttcattccaatctcaatccttgatggcaccaaaggccgagaagaaggccgccgccaagaagccggcggcgacgccgcccccagaggaggaaaaggaggtggtgcccccaccggcggagaagaagccggcggagaagaagcccaaggccggcaagaagctgccggcagccaaggagggcgacgcgaagaagaagaagaaggcgaagaagtcgatcgagacctacaagatctacatcttcaaggttctcaagcaggtccaccccgacatcggcatctctagcaaggcgatggggatcatgaacagcttcatcaatgatatctttgagaagcttgctcaggagtcagctcgcctcgcccgctacaacaagaagccgac

SEQ ID NO: 2242 - DNA, 421 bp, Lilium asiatic
agcaactctcttaaacactgctgttacacctgaagatgatctctttgctgatggggcttttgaatcattgccacctcttgctgaagcaacagagggttcccatactcagaacaacattgatctgtttgctactcaacctgcctttcctgctgcatttacctcaaacatagacctcatggggggatctcaattttcctcgactcttgaagcaaagacacctaacactcagcctgaagataataccaccttcgatccgtttgctgcaattcctctgaacagctttgaaggacctgatgcttttggtgctttcacatctcaaactgcaccagtgactgcagaaccttcactggattttgcaaatagtagtgctaatggcgcgaaccagacttcacagaatattacgaataataacattaatggt

SEQ ID NO: 2243 - DNA, 297 bp, Lilium asiatic
tctaacaaatttattcaccactactcttacatatataaatgatctctactctgatggggatatggactgataacaacttttagctaaagcacctatccaatgaccttatacaaacaacaaccatctgtatgttactcaacctcccttttctactatatttacctgaaacatcaaacttataaccagatctaactactgctaggctatttaagaccatacaagtaaaacttgtggtcacaataactgcacttatactgcattttaattcattacaatgaatagcttctgaagatcatc

SEQ ID NO: 2244 - DNA, 324 bp, Lilium asiatic
cggggcgacccacgcgtgcgaacacaaatcttatacactactattacaccttaatattataccaactctaacggatacatggcgatattcacatctgactcgcatatcactataaagaacacatactacaaacaacataccggcttattaaaatcaatacaccctttactcatgcatatacatcataatcataactccaaagcccaactttatattcttctcagataacagcacttacacctctcacacgatcgttacaacacaccaaaaaacagacatttgaatttcaagccatgcatagctcataacaatcaaaggcttttt

SEQ ID NO: 2245 - DNA, 391 bp, Lilium asiatic
gggggacccacgcgtccgcggacgcttgggatttactgtatgcacattgagttgcatgacataaaacctttatatgggcttcttcatgcaacacatcacatctacaataagcaaaatacgctctcaccgtttgctgggctagcgttccatccgttagacggtattctgcaggcgattccacatgtgatatgcctcttcctggttccgacccatttcctgtctcacatacttctcctcttcatcgaggcaatttggacggcaaacattcacgactgcatccatggcaaggtgtggcctatcatgggcgctggttaccacaccatccaccacaccacctatcgtcacaactacggccactacacaatatggatggactgggcctttggaacac

SEQ ID NO: 2246 - DNA, 388 bp, Lilium asiatic
  modified_base (46)..(46): a, c, g, t, unknown, or other
cgcgcgtgggcggacgcgtgggggaagaagttgctcggaaagcatnttgatggcttctggtgggggacagttgaaaatagccacagactgggatttttagtcacccggaaggttctggctcgatggacactgatgctacatccagtgccacccaagcggatatactggactacctgatggaaatggcagatacaaactgatggcactggtgagtcatattggcacctcaactcactgtgggcattacgttgcccacgtgcgaaagaatgagagatgggtgatatttaatgatagcaaggtcggggcctccttcaatccaccaaaggacatgggctatctctacttcttcgagaggatccaagagtaatgctgatttaggtttgtttta

SEQ ID NO: 2247 - DNA, 381 bp, Lilium asiatic
agtttgttgataggtgtgctcattagaatcatattatgcacccaaccactggtacgacacgtggccttcccatcctactaccgaagtttatttatctaaaaaagagcaacccagttcaggaggctcccgtcactgcggggtactggggagggcagatgtatgcagccttatccctgcatgcacagagactttttccggattcgagctcgtgacctccaggtcacaaggcggcaatgtttaccgctgcgcagggtcaccctctactgaagttaatttctttattgtatttaatttaccctatgatgtgaaagccgcaaggaagaaactactgcatgaatttggagctcttcgccggtggcttaatgaatgcagtgtcagtct

SEQ ID NO: 2248 - DNA, 406 bp, Lilium asiatic
  modified_base (24)..(24): a, c, g, t, unknown, or other
  modified_base (400)..(400): a, c, g, t, unknown, or other
tcgccacgcgccgggctaaggccnccgtagctgagctatatgtgacattaattgagggggccatggtaggctacactcctaagggatgaaaattgctcaagataccttggagcaaatgaatgctagagggttcttcttgaataacaaaatgggaagtgattccttcttgcagccgcaggggaaaagaccggtggatacaccactgctaactacatctgggatcttgtgcaagtccgcaggatcgccccttcttttcctgcggtggaggcctattaccgtggtctcaaggatcgcgagataccagcggatgatccaagactcatgatggttacacggacatgggataacctaaatgccagaatcggaccaagaaggaattagtatggataactatcgctgnctttat

SEQ ID NO: 2249 - DNA, 394 bp, Lilium asiatic
ccggtcgaccacgcgccgccacgcgtccgcacacgatcaaataaagtatttagtgagtcagggttgtatcaagccattgtgtgatcttcttatttgtccggatcctagaattgttatagtctgcctggaagggctagagaatatattgaaaattggagaagctgagaaaatatgggtgtcactgggggtgtgaatccttacgcccaaatgattgatgatgctgaaggtcttgagaagattgaaaatctgcagagccatgacaacacggagatatatgagaaggctgtcaagattctggagacgtattggctggaggaggaagatgagatgcccttgggtgatgctgctcctgctacatttggttttggcagtgagcagccttctgttccctttg

SEQ ID NO: 2250 - DNA, 354 bp, Lilium asiatic
  modified_base (323)..(323): a, c, g, t, unknown, or other
ggccctcatagctatggctatggttatgatccagaccaatgagtcttgtgactcccgtgttggtacattcaggcgacaactagagaagataattcttgataagcatgaggatacaatgagcaagatgggtgctattttggcctctggaattcttatgctggtggaaggaatgtcaccattaaactgctatctaaaactaagcatgataaaatcactgctgttgttgggcttgcggtgttcagccaattttggtactggtacccactcatctatttcgtaagtctcgccttttcaccgacagcatttgttggactcaattatgnacctgaagtaccaaagttcgatttcgtatca

SEQ ID NO: 2251 - DNA, 369 bp, Lilium asiatic
  modified_base (7)..(7): a, c, g, t, unknown, or other
  modified_base (12)..(12): a, c, g, t, unknown, or other
ctcttcnctctnttcaactaaaatcttcaatggctcccaaggctgagaagaagccggccgaggaggagaagaagtcggtccctgcggagaagaagcctgccgagaagaagcccaaggcagggaagaaggtcccggcctccaaggaggggcttctgacaagaagaagaagaggtcgaagaagtcagtggagacctacaagatctacatcttcaaggtgctgaagcaggtccatccggacatcggaatctccagcaaggccatggggatcatgaacagcttcatcaatgatctcttcgagaagatggcacaggagtccgcccgcctcgcccgctacaacaagaagaacaccatcacctcccgggagattca

SEQ ID NO: 2252 - DNA, 225 bp, Lilium asiatic
gatccaatatatagaggatatgtctttccaagtttgataatcgggcttgggagtgcacagacgggtcagaaacctaatactaatttgtacgagagagaatggtgactgcttacgatggagaacatttatttgacacaagtaatttaactatggaagaccttgaatttgctgtactcgagaagtataaatcgctgaatcatgagccggtttggaataaagaaaggc

SEQ ID NO: 2253 - DNA, 415 bp, Lilium asiatic
gccgccctggactacctttttggcggtggagaggctcccacaaagcccgctgctaaccctccagctgctgacaatgctgggactgttgaaaagccctccggtgctccagctccacttgacaacggcaagcaggttcctgctggcatacaagaaacactgcaaggaacgcaaacaactacttcagagctgatggccagaatactggcaacttcctaacggatcgtccttccaccaaggttcatgctgcacctggtggtggttcctcccttggctacctttttggtggcggtagcaactgatgggatttctatgctgctttagaactgcaccaagtgattgcagatttctagttgaagagttgcttaatcatgtaatatatacctaaagccgaggccagaaacttctgccccttggg

SEQ ID NO: 2254 - DNA, 448 bp, Lilium asiatic
  modified_base (364)..(364): a, c, g, t, unknown, or other
ggttgatgtgattctgtcatattgccactatgggattaatgattcgagccttgtggatttgcttccttatttgaagagtaagggtgttggggtgattagtgcgtctcctcttgcgatggggctattgacggagaatggccctcccggtggcatcctgcatctccggagcttaagtctgcttgcagtgctgcagcagagtattgtagcaagaaaggaaagaatatctcaaagatagcagttcagtatagcttgactaataaagaaatatcaactgtgctcattggcatgaactctgttaagcaggtcgaggagaatgttgctgctgctctggaattatcaagctcagggatagatgaagatctgntgcgcgaggttgaagctatccttgagccggtcaagaaccaaacctgggacagtggcattcaataaacccggactatttattttc

SEQ ID NO: 2255 - DNA, 358 bp, Lilium asiatic
attcaaaccaccgtgcagcatcacaatcaaattttctgatgggaagactaggaaacaggcttctgtaaagaaggaaaatggtcaaacagcaatggtcccacttttccaaagtcaagaaaacattgctggggagtgtgtattgaacttatgcaaggaaaaaaggttgaacacaccggtgtgaagattgagcttcttggtcagatagaactatattttgacagaggcaacttttatgacttcacctccctagtacgtgaattggatgttcctggtgaattatatgaaagaaaaacgtatccatttgagttctctactgttgaaatgccatacgagtcatacaatggggtaaatgtgagac

SEQ ID NO: 2256 - DNA, 306 bp, Lilium asiatic
ccggccggattccggtcgccacgcgtccgcccatccgcagtcctttcaaatccctctgatggcgccgaaatccgagaagaagctccgcagagaagaagccggtggcggagaagcccgtcgccgaggaggagaagaagtcggcaccggcagcggcggagaagaagcccgccgaatagaacccaaggctgggaagaaggtcccggcctccaagggcaaggagggggagaagaagaagaagagatcgaagaagtcggtggagacctacaagatctacatcttcaaggtgttgaagcaggttcaccccga

SEQ ID NO: 2257 - DNA, 373 bp, Lilium asiatic
tccgcctgattcctctgaacatgattctccatgttattcaagctcggaaagtacaagttcacttattaccttgagggagttatttctgtcatatatcgctagtggagatgacatccaagttttgggttctttgagtttgctgtctactttatgcaaacgaaagaactagatgagtcaatgctagataggcttggaattcttccgcaaaggaaacatcataaaaaatacttgctacaatctttgatgggtgagggatcaggtgaagagaggttattttctttcaagagtggcacagtgaaagacagcatccatacttgaagtgatagatacctggcaaatcttaaaggaaagtatgggcttttattttggtggc

SEQ ID NO: 2258 - DNA, 318 bp, Lilium asiatic
accgtccggtatggtcacatgattgataatgttgtccttattgtcacgggcaccttgcatgaaagagatgttcaggaactgttggagaagtgccatcctttgggtatgtttgacagtatcgcaactctcgcagttgcccagaacatgcgtgagcttacagattggttcttgttgatacaccgttggctccctacttctccgagtgcatcacatcagaggatttggacgacatgaatattgagattatgaggaatactctctacaaggcatatctcgaggatttctacaagttctgtaagaaactaagtggagctactg

SEQ ID NO: 2259 - DNA, 324 bp, Lilium asiatic
  modified_base (10)..(10): a, c, g, t, unknown, or other
gacgcgtggngcaagatctcaaagccagcagcacgactatcagtgtcagagtcgcagaccaaggttccgaagatgcccccaccgcccaaggatgatgaggacagcgaaggtgaagaagaggaagacgaggaggaacatgggaacactctgtgggtgcctgtggggataattatgcggctgatgaattctggatatgctgtgatgtgtgcgagaaatggttccacggtgggtgtgtgaagatcactccagccagggcggagcacatcaagcagtataaatgcccagcttgcagcaataagagggcaagagcatgatctcagaata

SEQ ID NO: 2260 - DNA, 350 bp, Lilium asiatic
cacgcgtggggaatggattgccaaatggtcatggcagtttttgcatacatctaccatcagtcattcatcgattatcagagcttctcagttgagacaattcttgatcagattctgaggaaccttacttttgaggagcaacaaattctgtacctaagcttgggaggatgatccaggagaggctgttgaggcaatcatgaagccccattatggaccagattccttgcgtggcatgtatatagtctggtgcttttaagagctcattttagataaccccgttttagcttcatgttaagcatgtccatatagtgctgcttgtagctttctgctctgatatgcaccagaatcacatg

SEQ ID NO: 2261 - DNA, 320 bp, Lilium asiatic
aaagtgcaaaagatcatatcacatggaatcaactgctttgtcaaccggcagttgatatacaacttgcctgaggaactttttgctgatgctggtatacttgccattgagcatgctgattttgatgggattgaacggctagctcttgttactgtggcgagattgcatcgacctttgacaatccagaatcagttaagcttggtcattgcaagctcatagaggaaataatgattggagaagacaagttgattcatttttctggagttgcattgggtcaagcatgcaccatagtacttaggggagctagttttcatgtgctggat

SEQ ID NO: 2262 - DNA, 294 bp, Lilium asiatic
tccggtgcagtgggaagaggaaagatggggtggtttgcggtatgatcgtaaatagacgtaaaggggtatattgcaagtaccacacaccgaacacatctcagaaatattctactatgcgcgctgagctcaagggtgggaacatacgaatgtcggggctcaaccagagggggtacacatatttgatcctatgacggacagaacaaataccgtgaagtcctcgcagcgggttacagtactgtctgtggatggactcaagaaggcttaaagtaatcagacaaggtgactacaaatccc

SEQ ID NO: 2263 - DNA, 301 bp, Lilium asiatic
tccgatttgctcaggatattggattgaaattccatgcccctgaggagttctttgggtcactggatggtggcaagtaaaacttggtggagttaaaactgagaaatgacacctctagagaaggtggaattttgtgccgtacatggaactgtaaccacacttgttttgttactttcttttctgtgtggtgctgtttgccattgttaaaatgacgaattgctgtccctttataaaattcgtatgttgtctgtgttcctttctggactaaacgttgatgtatttttgtaggtctgtacattaccgt

SEQ ID NO: 2264 - DNA, 301 bp, Lilium asiatic
tccgctctttccctctccttgtgccctcaaacaaatcttgttgaggaggcttcaagcagtcaattgaaggataaatatggtgagaaaatggcaaagatgcagaggttcgatgatgaagcatataccttgtttgatgaacttttctcatatgctgcccaaaattcatcactccatcggctccagatctgaaggagcctcttgcaaactacaaccaggatgcttataggctgcagttgaagctgttcctctatgaagttaagcagcagcagttgcttctttgtgtacgtagttacctaaaaac

SEQ ID NO: 2265 - DNA, 386 bp, Lilium asiatic
gtggggtcaacaattgaggagaacaaatagaaagcgtagaaagcatatgaagtgtacctacatggccggtggtaatcttcttcatgagcattactttaccgttactttaccgaggtgccttgtatgatggagagcttttcgtcatagatctcgagttaggaaacccctctccctcgctttctaaatactcttgtaaatcatgataactactcttgtcagaagcgaaatgcaatcaaattgttgggcatatatcctcattcgaagatggtttcaactttgtatgttgtgttatgagagggggggcgactctatcaacgaataaatacaaatgtgtgagagcactctctagatgcattggagcacctttgtcattcagtatatggctt

SEQ ID NO: 2266 - DNA, 388 bp, Lilium asiatic
tcattcatatcgcaacaaagatccaagaaaaagaggaaaagtctcccaagtttgagaatcgcccttgtaagtgcacagacggttcagaaaccgtataccatttgtacgtgagagaaaggggacgcttcaagatggagaacatctatttgagataagtaatttaactatggaagacctgaaatctgctgtactcgagaagtttaaatcgctgaatcatgagccggtatggaagaaagaaaggccagaaagcatcagggatggtaatgatctcaaaattcatagaatatatccggtcggcttgacccaaagacaagccttgttacagtttatgtttagtgatgatgctgaacttaagaatttatagagagcaacccctgcgcgaagcttg

SEQ ID NO: 2267 - DNA, 295 bp, Lilium asiatic
acactcatcatcgggtttgatccctacagtgggactccgtcactttaccagactgatccgtcgggtactttctcggcgtggaaggcgaatgctactgggaggaactcgaactcgatgagggaatttctagagaagaattataaggagactccgggcaggagactgtaaagcttgcgattcgctctctgcttgaggttgttgagagcggcgggaagaacatagaaattgcagttatgacaaaagagggccttagggaactcgatgaagctgagatcgacctaatagtctcagacat

SEQ ID NO: 2268 - DNA, 258 bp, Lilium asiatic
tccggaagaatgtgaccattccttcgttcttcaggaagattttgggcttgtctgtcgtgtttgcggtgtaatacagaaaagtatcgatacaatattcgatttccagtggaaaaaggctcctaggatgatagcttacaagtcaggatcacacgttccaaggatgctgttgatgatgttatatactctgggcccaaattttccgaacaaaaccttttagctgctgatatttctgttcatccgaagcacttgaagcagatg

SEQ ID NO: 2269 - DNA, 344 bp, Lilium asiatic
tccgggccttcacactggccgcctcttcatcttcgtctccggcgatgactgtcgtcttgttcgcactcatggcctcggcggttctttccgatggggcggttttcaaggtcggcgataccgtcgggtggaccatcctcggcagccccaactaaccgcctgggcagccagcaaaactttcaccgtcggcgacaccgtcgtgttcgaatacaacaaggcattccataatgtcatggaagtgaataagacggactacaagggatgcaacacagcttcgccccgggttacctacacaacaagcaacgacacgatcaaactgaagaggaagggccatcactacttcattt

SEQ ID NO: 2270 - DNA, 182 bp, Lilium asiatic
  modified_base (49)..(49): a, c, g, t, unknown, or other
  modified_base (63)..(64): a, c, g, t, unknown, or other
ataaaaaacccatcacttttagcatctatatttgaaaaaatctgggcangggctgaattacannaagatgagcagttgaagtggcccggaatgaaaagggatgcagaacattattcacgacaggaacatgtcgaactagagaaacgttaccgtgagctaacagatttactgtaccataagca

SEQ ID NO: 2271 - DNA, 343 bp, Lilium asiatic
atttctggagatgatgggatccttacaagcgtcttggtgtaactcgtgatgcttctgaggaagaaatcagaggggcaagaaactttcttctggaacaatatgctggacacgagagaagtgtggaatctgttgaagctgttatgagaagatcctaatgacgagtttcagggaaaggaagaaatcaaagataaatctgaaaagcaggttgaaaaagaaagtagaagaatcacctccttgggtgcaaacattgctgagttatgttgagcttcctccgatggacatcatccttcggagatttttcctttttgcgtttttgggggtttggagtgttacacattctact

SEQ ID NO: 2272 - DNA, 346 bp, Lilium asiatic
gacgcgtgggttccggtcccgcgaagggtaaattttgttgggaacagcaaccagagtggagtgcatttagagaaagcagctttggacatggaattctagaggttattaattcgacatatgccttgtggacgtggcatcgaaatcaggatattacagagaaaacagtagaggtgatgaaatatacatagttcgacaacctgaatcctgtttaagtgcgagaaaggttgcttgattagagcaggcaaacaaaatatgaatcgcggtatacgtaggtgtgaaataaaaatgatttattcccagtggcttttgttaattcaacagttattatggtttcagtcattttttt

SEQ ID NO: 2273 - DNA, 392 bp, Lilium asiatic
gacgcgtgggattgaacattggattgaattgtcttggttgattcctttttggcttggtactttgggagtggatatatagaaggagcgaagcgaaaggaacagcagccctgtacggctctcgaagttccttggccgtgataaagatgatgcatccgccgcagtgccgtttctggtaaaaagattttattgaagcttgataaatcgaaggaagacaagttggcagaaaccaaccgcaatgagttactgaagtttctgaactctagctatgattgaactgtggcgatgatggcatggatatatgtgactaaatggaatatggcaagataaagtatgcaaactatggtaaatggcaagacaagtcttttaagtttggaatgtttctgtttgtgggc

SEQ ID NO: 2274 - DNA, 313 bp, Lilium asiatic
ccacgtccgagcataccatttgtttgttaatgacgggaacaattcacttcatggtgggcataggggattcagtaacgttgtttggactgtgaaagagaaagtagacggtgaattcccctatattaaattatactatcatagttttgatggtgaaaaggttttcctggtgaccttgatgtgtatgttacctacaagctttcaggagactatgagttggatgtaaccatggaggcaaagcctctgaacaaggctacaccagtaaaccttgcacagcacacatactggaatttcggggggcattggagtgggcgca

SEQ ID NO: 2275 - DNA, 347 bp, Lilium asiatic
cggatcccggtcgccacgtccgatggttctacaagggcactttctccaattggccacttggggttaacagatatgagtttgatcagatcagggcacctgtgggaagggtctacttcactggcgagcatactagcgagcattacaatggctatgttcatggtgcttaccatcagggattgattctgctaacataatgattaaatgtatcaagaaaggattctgcaagtttgccgtaaagcccaaggattccaagaattaacaagatgaaggtaggtgtgatatgtgagcaaattaaacgttatgtttgaagcgaggagtttcttccaacttttgaaagttcatcgatg

SEQ ID NO: 2276 - DNA, 195 bp, Lilium asiatic
  modified_base (14)..(14): a, c, g, t, unknown, or other
catgcactatccangcattcctaacaagatggagtttccaccgacggtttataaggaaagtggaagtgccgatgcaaacttcttggacgataataaaagggtagccacagagaaccaacataatatgctcaacgtgcacgaggcacaacatcctcaacttcagaaggtgatgtctttttaccttggatagaagga

SEQ ID NO: 2277 - DNA, 357 bp, Lilium asiatic
  modified_base (5)..(5): a, c, g, t, unknown, or other
acggngaagagctgttcacgtgcagcccgccgtcgccgtcgtcctcggtaatcgcccgccggagggccccgggaccctctatatctccaccaggagagtgatgtgggtgagctatcccgatggcggcaagggctatgcggccgattttcttcagtatcgcttcatgcggtgtcgagggaccccgaggcgtatccttgtccgtgtatctacactcagattgagactgaagacaacgaggatgacgaatccgagggctcggattcagagtgtactgacactctagagctatcaaagatcacagaaatgaggctcgtgccatctgatccttgtcatttggacaccatctttgacattttt

SEQ ID NO: 2278 - DNA, 382 bp, Lilium asiatic
agcgtccgccgagaagcgataacggtaattcgagggcatactgtagccatatgagcaatgagcacaaatgccttataggcaatcccatgcagctaagcaaagcctcgagtgaccaaccaagccttatgtcgctcgacttgaccatcaggtcgatattgatcttgtagagccatttactgccgacatgtgtcactcccggggacaaggaacaccataccaggtgtgcgtcaatgagaaatcccgaagctcctcgtccatggcctaaagtcgccagtattcagaccgcctcctggtacaatcgggactccataatgctgtgcactgcagaaagagagctcgaatgtatgtgcgtaagtagtaattgacatgaacttaagtgagc

SEQ ID NO: 2279 - DNA, 268 bp, Lilium asiatic
tcgcccacgtccggcctgctaattattcccttgatagcagatgattttgagatacctgggtgctgatttgtatgttacggattataaacttggattccaaggacaagttgacaaggtggaacagctgaaagaaaacgatccaaatatgtatcttctcaacagtttgctaatccggcatatgttgaagcacacttcattggcactggagctgaaatctggaaggacacagcaggcaaagtggatattcttgtctgtgcttctgggacag

SEQ ID NO: 2280 - DNA, 354 bp, Lilium asiatic
tccgagctattccaaccttgtgtggcagaaagattgagagcggcttgacttgtaattgagaggtgcgaggtgtgtgattttctcattgcttctcttttatttgcaagttttttggattttagtggcggcctggatgtagtttcaagaagggcaaaccatcacatctcggtgtttttgattatgcttctattttcttcctttctttcataggctccattggaatttgtgagtcgggtaactcttcctgtgagttgatatgatagggacatcttcacggctttggtccaacatcacatttagcacccacggtcctgggtgattaggctcaataaaatggggttgacttttcttttt

SEQ ID NO: 2281 - DNA, 122 bp, Lilium asiatic
ttggactcgtactcgagtgatacggtagagcatgatctttcgggacatctactcagctacccgatcggagtcactaatggtggtttgatcaacgagttgccagggttcagtttctttcccga

SEQ ID NO: 2282 - DNA, 259 bp, Lilium asiatic
aagcatctgccgacaggaggttcacgggaaagctatcaaacggcaagaacagctcgaggtcatcaaatggcagaacgaacaaggctcaatcggcatctgaatagaaagtggcaactaatcataacactgttgggggcggcgcctcccccaagagataatgtcatggcatgaagggtcatctgtgctcgacctgaagggcgataattacttctcttgtgcggttgggcggaagccgtctaatgcgaggtaccttcttggg

SEQ ID NO: 2283 - DNA, 291 bp, Lilium asiatic
  modified_base (235)..(235): a, c, g, t, unknown, or other
agaaagctgccccagccgagaagaagccggctgagaagaagcccaaggctgggaagaagcttccggcctccaaggagggggagaagaagaagaagaggtcgaagaagtcggtggagacctacaagatctacatcttcaaggtgttgaagcagtccaccccgacatcgggatctccagcaaggccatggggatcatgaacagcttcatcaacgacctcttcgagaagatggctcangagtctgcccgtctcgctcgctacaacaagaggaacaccatcacctcccgagagat

SEQ ID NO: 2284 - DNA, 384 bp, Lilium asiatic
  modified_base (165)..(165): a, c, g, t, unknown, or other
  modified_base (334)..(334): a, c, g, t, unknown, or other
  modified_base (337)..(338): a, c, g, t, unknown, or other
  modified_base (343)..(343): a, c, g, t, unknown, or other
gcagattcgcatgtgtccccaatagcaagttatcatgtcacgacctcttttttatcttcaaaacaaaccatgtttggcagagaagacacaaagactcatattgtagatctgttgttgaatgggcaggcctcagtaacttcagatgtatctgtccgtgttaaggancatttcgactgtggattatggctggatgtttctgataagtctaatgttcccaggctcacgagaggattgcttgtgtagtggtccgataacataacagatgtgggtcaattacagactcttctgacggaaaatttttgctccaagaaatttttgctcgtcatggacgatnttnngaatnattctgataggcagaaatgagatatgctatgtggtcccctt

SEQ ID NO: 2285 - DNA, 368 bp, Lilium asiatic
  modified_base (52)..(52): a, c, g, t, unknown, or other
  modified_base (63)..(64): a, c, g, t, unknown, or other
  modified_base (208)..(208): a, c, g, t, unknown, or other
  modified_base (283)..(283): a, c, g, t, unknown, or other
ggtcggacccctcgtgcgcgagaaggagcccaagtttttgaagaatggtgtngctggatatgnnaagatgattcctaccaagcctatggtggtggagactttctctgagtatcctccgcttgggcgttttgctgttagggacatgcgccagactgttgctgttggggttattaagagtgttgagaagaaggattccactggtgccaangtgaccaatgctgctatcaagaagaagtgagggtgtctttaagtttatgtgtgagattgttaagatctggaggantttgtgggtaatgcttgtttttgtttatcgaactttcgtgttgttaggtcagcggttttgatcaaacattttggcttttaatttt

SEQ ID NO: 2286 - DNA, 318 bp, Lilium asiatic
  modified_base (190)..(190): a, c, g, t, unknown, or other
gcggcgtcgcccgcgacacccgcaagcgcgtcatcggcgtcctcctgggctcctccttcaagggcaccgtcgacgtcaccaacagctacgcagtgccatttgaagaagatgagaaagacccaagcatttggtttttggatcataattaccatgaggcaatgtttggcatgttcaaaagaataaatgccanggaacatgttgtcggttggtatagcactggtcccaaactacgagagaatgatttggatattcatgccttgttctccggatatgtgcctaatcctgtcttggttattattgacgtccaaccgaaagagc

SEQ ID NO: 2287 - DNA, 420 bp, Lilium asiatic
  modified_base (324)..(324): a, c, g, t, unknown, or other
gcggaattagggtttcgttgatagcgaagatgaccgggaaggcgaagccgaagaagcacacggcgaaggagatcgctgccaaagtcgacgcggcaacgacgaaccgcggcggaggcaaggctgggcaggcggaccgcatcggcctcgacaagggcggccacgcgaagctggagtgccccctctgcaaggtaaccgctcccgacatcaagtcgatgcagatccaccacgacgcccgccatccgaagatccctttcgacgaaacgaagctgaataacctccacgcctccaccaccgtcgtcggcgacacctccaagccccgcccgngggtccgcgggtccctcaagaagtagccgtctcccttacttactgcttagtttctctttcgattattataatcatgcctatgcctagctaaataat

SEQ ID NO: 2288 - DNA, 416 bp, Lilium asiatic
  modified_base (324)..(324): a, c, g, t, unknown, or other
cggacgcgtgggcggcgctacaggcggtgaagctgctcgcgctctacctggccggagataaggatactgcaattgcaagtctccaagaatggttaagtgatgcagcaataggaaacaatcctgtcctccgactgattgcagggattatatatatgcacgaagaagactacaatgaggctcttaagcatacaaattcaggtggaactatggaattgctagcattgaatgttcaaatatatataaagatgcacaggtcagactacgcagaaaaacagctgaagctaatgcaacaaatagatgaagatcatacattgacacaacttngaaatgcctggctaaacctggcagtgggtggttctaagattcaggaagcgtatcttatatttcaagatttctctgagaagtatccgataact

SEQ ID NO: 2289 - DNA, 323 bp, Lilium asiatic
ttcacggaatgagatgcccctccgacccatccttgctgttgagatctttgacacttggggcatcgatttcatgggtccatttccgaaatccaaaaacttcgaatacattcttttggctgtggactatgtttccaagtgggtagaagcccaaccttgtcgaaccaacgaccacagagtcgttgtgaagtttctccagacccacatttttgcccgatatgggatgcctaggaccatcatcagtgatggtggtacacattttctgcaatcgcacttttgccgcgctcatgaagaaacacggtatcgatcatcgagttgccacacct

SEQ ID NO: 2290 - DNA, 367 bp, Lilium asiatic
gcgaggacgccggcgaagcggacgaggaggaggagctatcggatagttacacgtgtgtcatctgccacgtgggcggctcaaagcgggtgtacttcgacgatggctccgatggagttagatataactacggagcgagtcctggggtattcttccagtcgccgccggcgattaaggcggtggagttcattaatcggtggtgcctctgcgcgaagaagcttcgtagacgtgatatcttcatgtacagaggtgataaagccttctgtgtttatagtgcaaatgccagcaattcatgagtgatgaatacagggaaaactgtaactctggagctttggagcagccgggaggctacactgtgtctcccacactc

SEQ ID NO: 2291 - DNA, 310 bp, Lilium asiatic
  modified_base (188)..(188): a, c, g, t, unknown, or other
  modified_base (266)..(266): a, c, g, t, unknown, or other
gcctgattatgaggctctgccctcgtcacatctagtagccactggctcatcccaccacaagcgaccaaacgggtttagagactgtcctttgacaaaggttaaggcatactcagggaccaggggcttcccggaaggtaaaagctctaagatgttgggtatcctttcaataacattatttggtgcaacantgggaccaggaagattacggaaattagctcccttaaactttggtatgcgcacactctttgaaaggcatcgtctttacnttatatggtaggtggtcaaaaagggttccattaagtgtattctc

SEQ ID NO: 2292 - DNA, 428 bp, Lilium asiatic
ccgcacagctctcattcttgacatcttcaaccaaagggccgcaacacacgaagcggctttgcaggttgctttggcacaaatggaataccaacttcctcgtctaacaaaaatgtggagtcacctggaacgtcaggcaggaggacaggtgaaaggtatgggtgagaaacaaattgaggttgacaagcgtatcttacggactcaaattggtgttttgagaaaagaactggaatctgttaggaaacatcggaggcaatatcgcaaccgtcgttcgtctgttcccattccagttgtgtctttggttggttatacaaatgctggaaagagtacactgttgaatcgcttaactggagctgatgttcttgcagaggatcgattatttgcaacattagatccaactacgagaagggtcaagatgaacaatgagaagg

SEQ ID NO: 2293 - DNA, 428 bp, Lilium asiatic
cggacgcgtggggaaacagccaatgtccccatagttttaagatatatcaactttgaagctggaaggcatcatcttacatataagatggaaacagaaataaaactctaagaacggatgagaagctcttcaaaacgagccccattacaatggttaaaaaaaaacagaagaaggtgaaaacaataaacaggaactacacgacactcaacttggccggtggtgaagtttaccaccgcggccaaagaggtacagaagcagtatccatacaactgacttctcctcttcaaacatcagtctaaggccccgaaaccataaccaaggcctaggatgctaatacaatacgatggaagtggccatttcaaaatatgccccctttcatctacttcctatttacaatgcactacgtatagatcgggactcaacggaatggg

SEQ ID NO: 2294 - DNA, 435 bp, Lilium asiatic
  modified_base (399)..(399): a, c, g, t, unknown, or other
gtaattatcaatgttgcaattgggaacggtgagcttgcaataaaattggatatgtcgcagctctaaagagaaagagatgggtaatatctctccaggctctcatatgtttatgcttatagatttgtatgctgtactcatgcctatgatcctgttagcttagtgaggcattgcttgcaataagattttgttgaactgagatatgcttgtgccaatgatcactatgtgaggttaaataagttgggcataggtggctcttctgttttattgctttatgcaagtaattaaccttatgaattgatactttaccatgtgtctatgtgccttacacttctctgtgctgatgtacctaggggttgaagatggctctaacagagcacctccccctaggacattactagncatgttaattgtattcacttatcatatgaccctatg

SEQ ID NO: 2295 - DNA, 334 bp, Lilium asiatic
  modified_base (302)..(302): a, c, g, t, unknown, or other
gtttttggagtacaacagcaagagcagattaattatgaggaagagcctgttgaccggagcaaacactggggagacttggaggaagaagaggaagaggaggaggaagaggaagaggaaatggaggaagaggagttgcaggaaggcattgaatcagttgagagcctttcaagcactcaagctggtcaagaaacacctgatgttattgaccttcggaagcaacaaaggaaggaggacaagcctttgtatgaagttcttgaggagaggccagaaaagattgctcctggtactttgcttggacaacncacacctatgtgcttggacacaggacaaacac

SEQ ID NO: 2296 - DNA, 448 bp, Lilium asiatic
  modified_base (359)..(359): a, c, g, t, unknown, or other
gccgggccggcccacgcgtgcgggaagtttaaggatgctttaaaagactttcaacaggttaaaaaaattcgcccaaatgatcgagatgctactaagaagctgaaggaatgtgagaaagctgttcaaaagctgcgatttgaggcagcaattgctgtgaacgatgccgaaaaacgttctgttgcagattcaattgattttcattggatagatgtggagccacaatatgctggtgcgagaatagagggagaagagataactttggattttgtaagaagcatgatggatgattttaaaaatcagaaatgcttacacaaaagatatgcgtgccagattgctttgcaagcaagagaaaaattgcnaggcgggccttctctagttgatattactgttgagaatgggcatcacttcaccatatgcggtgatgtgcatggacaggattttgatttac

SEQ ID NO: 2297 - DNA, 424 bp, Lilium asiatic
aaaaccaatagccataattgcattcataatacatccgcgatctaatattctctgatttacagatttcactaacaatcacgacccaaactgcaaaccaacaaaaagaaaaagacacaacatagtgaaggtaaataacaagaaacacagatgcaccaagaagctcaggctctgctcttgaatgggattgctctgatgaccaccacgtgatacaacgcagcaagtgcggctccagtggaaggcccaacccagaagatccaatgatcatcccaagcatgcttcttgttgtagatgataaccgcccctaaactccgttcaggattgataccagtcccagtgatggggatggtcgccaagatctacatcttcaaggttctcaagcaggtccaccccgacattggaatctcagtaggggatggggacatga

SEQ ID NO: 2298 - DNA, 362 bp, Lilium asiatic
  modified_base (315)..(315): a, c, g, t, unknown, or other
  modified_base (320)..(320): a, c, g, t, unknown, or other
gcctatggatccaatggaatattcggatgatacagtggccctcacgaatgttccattttatgctgctatttgtgagattgacaagtttctgaaggattgtgggaaagtaataggtattcaagcagaaagggtgaggaatcctcagagtgggaagaagtgtcaagttgtatttgtcaccttggaagattcagcagcagcaaaaagagcacttcttaaggaatcactgatggttgatgaaaatctaatagacatcacaactcctcgatctgcctccacctggcttaagccaaaagaagtcaaaactattagcaattntgagntctcacttgaaaagtacgatgagctcagaagcacgtatcaaa

SEQ ID NO: 2299 - DNA, 344 bp, Lilium asiatic
  modified_base (6)..(7): a, c, g, t, unknown, or other
  modified_base (58)..(58): a, c, g, t, unknown, or other
  modified_base (207)..(207): a, c, g, t, unknown, or other
ccgggnncgcccacgcgtacggttgtacacttttagttgaccttccaaattcctggtntgtaacagttgggagcatgtctcgggattcttcggtgtttcttttctcagtgggtggtgacaaatcttcgagccgttagccataccggttctctactgtctgctggcttttcatggatctttgacctcagggcttttgtttaatttcanttgcttttatgaaacatgtttttggaaaattgtttaatatatccttctttgtgttcatttgaatttcttttagtttggtttaacttacacaggtgggcccttgaggatctccagaggattcatgctgctgaggagct

SEQ ID NO: 2300 - DNA, 313 bp, Lilium asiatic
  modified_base (258)..(258): a, c, g, t, unknown, or other
agcacattgggcatgcttcgactgtgcggcgtgatgcccctcctgggcagaaggttggtcgcattgctgccaggcggactggccggctcaggggacaggctgctgcaactgctgccaaagagaaggcttaggaaaggttcggttattttacttgttggtttatttcagttcgagctgagtaggttttatttcaaggactattgtgtctaggagatctatttttgggtattgcagattgtgctactcctaattttatgngatgggaaccctacttgttctattatattgctttaaggtgtttctttttcataat

SEQ ID NO: 2301 - DNA, 367 bp, Lilium asiatic
  modified_base (142)..(142): a, c, g, t, unknown, or other
  modified_base (328)..(328): a, c, g, t, unknown, or other
acgggagccctcatagctatggctatggttatcatccataccaatgagtcttgggactcccggggtggtacattcaggcgacaacgagagaagataattcttgataagcatgaggatacaatgagcaagatgggtgctattntggcctctggaattcttgatgctggtggaaggaatgtcacctttaaactgctatctaaaactaagcgtgatggaatgactgttgttgttgtgcttgcggtgttcatgcaattttggtactgggacccactcatctatttcgtaagtctcgccttttcaccgacagcatttgttggactcattattncgcggagagtaccaaaagttcggatttcgtattcacttt

SEQ ID NO: 2302 - DNA, 328 bp, Lilium asiatic
atgcttactaccttttagagattggttattaatcttgcaactagatttgagtttatgcacgagatttcaatatgtaggtatcaaaaatcttcattattggtttcatagctacataaagaagagattatgtggtgtctgattctattacaagtagtactagaaagaattgttcacaatatttagtcaattcccgattagtggatgaattcgttgagttccaatggagcaatggtaaaaaaaaacaagcatcagaagatcgataagcatgattgcagaactttggtatctagaagatatagatgaaagattacctctatcataaagatct

SEQ ID NO: 2303 - DNA, 322 bp, Lilium asiatic
  modified_base (30)..(30): a, c, g, t, unknown, or other
  modified_base (179)..(179): a, c, g, t, unknown, or other
attcggaatgtgaagttcaaaatcttagangcatctattgctgcacaacccgtacatcgggggggtggtcagattattgccacagctcgacgtgtggcttactcaccttttcttatggcgaatccccgactcatggaaccagtctattatgtagagatacggactccaatggagtgtgncggtgctatctacacagtattgtctcggagacggggtacatttgacggggaatgtaccaaaggctgggacgccagcgtgcgttgttaagacctgaggtaccatactcagggccaggcattttgcctttcagtgttccatcact

SEQ ID NO: 2304 - DNA, 397 bp, Lilium asiatic
gaggaagcttaagtatccgactactgggaccgaggctatcctcatgggcatccttgttgggggaacaagccaagcagcacagtttcttcgtgcaaatggcattactctttttaaagtacgtgaggaaactgtcaagttacttggaaaatcagacatgtacttctttagtcctgaacatccaccattaactgagccagctcagaaggcgctagattgggctgttgatgaaaaactgaaatcaggtgaggatggcgagataacagtggcctatatgcttttgggtatatgggcgcaagaagattcagctggtcacaagatattggcatcccttcgttttgatgatgataaagcaaaagaacttgccaaggctgcaagccaagatatagtgatgcactac

SEQ ID NO: 2305 - DNA, 175 bp, Lilium asiatic
  modified_base (58)..(58): a, c, g, t, unknown, or other
  modified_base (70)..(70): a, c, g, t, unknown, or other
caatatgccgttcgacccacgcgtgcggtggaaagtattctgttaaaagaaaggcatntttgtttatttntttttttatactgctcgagggtgaatggggggggttcttatactctgaacactacaagtgctgtcactgcgaggatcaccatccttcgtctgagaaaacaaactg

SEQ ID NO: 2306 - DNA, 321 bp, Lilium asiatic
gcgaacctgatcgagatggcgaagagttacggcgtgcgcggcttcgcgctgtaccgcgacgtgattcttcctggtgctttggcgtcgatcctcgtcggcgtgcgcttcgcgctcgggctgatgtgggtgatgctgatcgtcgcggaaacgatctccgcgcagtcgggcatcggctacatgacgatgaacgcgcgcgaattcctgcaaaccgatgtggtggtggtcggcatcctgctgtacgcggtgctcggcaagctggccgacgtgctggcgaaatggctcgaacgcgtgacgctgcgctggcaccccgcttaccaatct

SEQ ID NO: 2307 - DNA, 339 bp, Lilium asiatic
  modified_base (276)..(276): a, c, g, t, unknown, or other
ccggcctcacgactcccatcggcgccaccgaatacggcggcgatctcctccagcaatgatccgcgcggtgattgtgatgaacacacagggaaagccccgcctcctcaagttctacgatttccagccgccggagaagcagcaggaattgatccgcagtgtgtacggagtgctgtgtgggcgagctgagaacgttagcaacttcatccaagcagacgccattttcggcccggatactaggctggtatacaagcattttgcaacactctatttcggttntgtatttgatagttctgaaaacgagcttgctatgcttgaccttatccaagtttttgtagagac

SEQ ID NO: 2308 - DNA, 169 bp, Lilium asiatic
  modified_base (130)..(130): a, c, g, t, unknown, or other
tttcgacccacgcgtacgcccacacttccgctatacctccctttgcatctcatttgaattgtaattagaggtctcactggggcccgagcgggggagggcacattgttggccgtctttctcttggcttagnaggagacacattgcgagagcatctacaagtgatttctta

SEQ ID NO: 2309 - DNA, 363 bp, Lilium asiatic
  modified_base (259)..(259): a, c, g, t, unknown, or other
  modified_base (320)..(320): a, c, g, t, unknown, or other
  modified_base (325)..(325): a, c, g, t, unknown, or other
  modified_base (332)..(332): a, c, g, t, unknown, or other
cggacgcgtgggggtcgtcagagggacaaaatcagtcaagttggatgtggtgcctggggtggatgataatcaaactctacggattccgagaaatggtggatcacatcctgatggtgaacagcccggcgatctttatgtcacgattaaggttcgagaggatcctgttttccggagaaaaaaatccggtatacatgttgatgcaacaataggtgtcactcaggctatcttgggaggtaccattcaagtaccgactcttacnggagatgtcgttgttaaggttaagcctggtactcaacctggtcataaggtggttataaganggaanggaatanaagacaggaaaaccggttactatggcgatca

SEQ ID NO: 2310 - DNA, 319 bp, Lilium asiatic
cgatgatttcatcatcagcactaatcccaaacaagtgcaggaaagggcgagcacccttgactacatcattgacaccgtctcggctaagcactcactgatgccaattatgaatctgcttaaagtgaatgggaagttggttgtagttggtgtgcccgatgagccatttgaagtccctgcatttcctctcatatttgggaatagatctgtgtcaggcagcatggctgcagggatgaatgtgattcaagagatgatggacgtgtgttggaaagtattacatcacctgcgacatcgagttggtgaagccagactacatcaacgt

SEQ ID NO: 2311 - DNA, 185 bp, Lilium asiatic
  modified_base (62)..(62): a, c, g, t, unknown, or other
  modified_base (74)..(74): a, c, g, t, unknown, or other
cggaattagccgggtcggaccccgcgtgcgcctttttttttttttttggtggtatggttttnctaaaggggtgntgaaaacattactacaggcacaatatatggattttttttaagtgcatagtggacttaacaccgtaaacagaatcattcaaaaaaagacagtcctgtgcgttgagcctgaaa

SEQ ID NO: 2312 - DNA, 318 bp, Lilium asiatic
  modified_base (21)..(21): a, c, g, t, unknown, or other
  modified_base (259)..(259): a, c, g, t, unknown, or other
ttttgaccacctaccatatanactgatcgaagatgactttcagagagtgtgccggataccggggtttaagggagctaatttccggaatcttcctggtctcactgttggagcaaataatgttattgaaaggatacccaacatcctagagcttttaccgtacgggaagcccgtggggcctgagtatgccttatcctttgtcaaaggagagtctctaaagccgttcggtcgatggtcgtgggatgagacagttgttactgtngtgacgagggcagagcctcataatcaggccattttgcattcagaacaagatagagtgct

SEQ ID NO: 2313 - DNA, 142 bp, Lilium asiatic
ctcccacctcacatcatccttcatgtgatagtaattgtttaaaaactcggcgagggtggggagggtctcggcaaaggcggagccaatcggcaccgcaaggtccttcgcgacaacatccagggcatcaccaagccggccatcc

SEQ ID NO: 2314 - DNA, 325 bp, Lilium asiatic
  modified_base (31)..(31): a, c, g, t, unknown, or other
attgccgtcgcgtccgggaagggcggtgtcngcaagtccaccaccgcagtgaatctcgcagtagcgctagctgaggcgtgtaagctgaaggtgggcttgctggatgctgatgtgtatgggccgtcgattccgacgatgatgaagcttcacgggaagccggaagttaatgaagatctcaagatgatacctattgaaaattatggggtgcgatgtatgtcgatcggttttcttgtcgggaaggacgcaccaatagtttggagaggggccatggaaatgagtgctcttgaaaagttgacaaggggggtagctgggggcgatcttgaca

SEQ ID NO: 2315 - DNA, 330 bp, Lilium asiatic
  modified_base (46)..(46): a, c, g, t, unknown, or other
  modified_base (192)..(192): a, c, g, t, unknown, or other
gcgcgaagaaccattgcatccaatgtcatcacttccacctctgcanacactaacgggttgacgggctaccagacctgtcaaacaaaatccgaagtatgctcaatgcctccactacctattgttgactgatggaggggaaccaaaatgtttcaatgaagcacaacttttggtctttttatcttaagattgatntctctgtgaacgatgagatggactccttgaagaagaacttaacatgggagtatgttcgtattttttgagggaggaatgcgtttcataaccggtgggtttacatgattaaaaaagagaatggtgctagtctgaggtaca

SEQ ID NO: 2316 - DNA, 366 bp, Lilium asiatic
  modified_base (24)..(24): a, c, g, t, unknown, or other
  modified_base (265)..(266): a, c, g, t, unknown, or other
  modified_base (324)..(324): a, c, g, t, unknown, or other
  modified_base (337)..(337): a, c, g, t, unknown, or other
cggacgcgtgggcggacgcgtggnggggtgttcgatgtgatggttgtggaatgcttccgggcatgggcccacggtttaaatctaatgtgaaggaaaactatgatttatgcagcttttgtttctcagaaatgggcaatgcagatgactataccagaatggaacgagcccattcttagatactattgatggaattgcacaaccggcactctggatatggtgctccttcggcacggttctttggttgtaggatgagatcaccgacaannaaacctgaaagattgagtgccattcagagttgtttcattaaagacataactatcaagnattatacccctgngccttcttcgactccttttactaagatat

SEQ ID NO: 2317 - DNA, 246 bp, Lilium asiatic
ctgcaataacgatacagcaagtgcgcatgcttcttgtgagaatccacattcaacctggtggatggggcccacaatggagactcctactgacaatgtacttacaatggctaatatgatgaacacacctaaatggacaatactaacgacactaactaagggtactgttttgctatcattacaatatccagggcttaattgataaaagatctacagcttcaacattgtcttctacaggtatatcattga

SEQ ID NO: 2318 - DNA, 390 bp, Lilium asiatic
gtagttctctcaccttcgataacgatgtcttcttgctgtggtggaaagtgtggctgcgggtcttcctgcaagtgtggcagtggatgcaatggatgtggtatgtatcctgacttggctgaggggagcactgcctctaccactatgatcatggggtttgctcctgctaagggggagtttgaggggtttgagatgtatgctgagaatggtggctgtggctgcaagtgtggtgataactgcaactgcaacccctgcaagtgtggcaagtgagctctccatgagaggaggatgtagggtttgataccctttgtttacttgtttctgttgtagtgctgaataatggccatggtttacatgatgcaagctcttttgcaccgtgagtggttcaccagt

SEQ ID NO: 2319 - DNA, 169 bp, Lilium asiatic
cggcgcttgggccgtcgcgtgggtcgtcacatagcggggtctttggggggaggctgtcttcacaccctacgtcgtgatgtctggacattgacgattgcgaggatgcggacatttatgttgagactgccggcttgacgacttgcaaggaagcgaagcctcctgcgatcag

SEQ ID NO: 2320 - DNA, 381 bp, Lilium asiatic
ctctgactgtattagtgggaagggtgcgaaaactatggatattggagctgcacacactccgaatggcggtgcacttgatgttgatagcgcgaacgatgatacgcgttgatacgtactcttgaaagaattgaaaatgcacctagaggagaggaaagtgatgaacaggatgaacattcacgtgttgagcaaggacgatggcagatctcttactgaagattcttgcggataggaatctgacgctccggatggtggagctgaaaaagaactgcctgacaaaaaagatcccaagacatatgccgctctctacgaacgcgaggatgtaccagaagaaatccgaggatggggatgatgaaggtgcatagactaaaagggccaagaaga

SEQ ID NO: 2321 - DNA, 344 bp, Lilium asiatic
ccccactcctctcctacattacccattttgcccctctcgaaaccctaaccctaagagatgaagggcgcgaaatcgaagaccgacaccgctaaggtcaccaagaaggccgaagccaaggtggcaccgaagaggaaggcggcggagaagccgagcaaggcggccaagccggcgaagaaggggaaggccggcgttgaccccaacaaacccaagcgccccgccagtgccttcttcgtgttcatggaggagttcaggaaggagttcaaggagaagaaccccaacaacaaggctgtctctgctgtgagcaaggctgggggagacaagtggaaatcaatgtctgatgctga

SEQ ID NO: 2322 - DNA, 430 bp, Lilium asiatic
  modified_base (89)..(89): a, c, g, t, unknown, or other
ccccactcctgttctacattacccattttgcccctgtcgaaaccctaaccctaagagatgaagggcgcgaaatcgaagaccgacaccgntaacgttaccaacaaggccgaagccaaggtggcaccgaagaggaaggcggcggacaagccgagcaaggcggccaagccggcgaaaaatgggaaggccggcgttgaccccaacaaacccaagcgccccgccagtgccttcttagtgttcatggaggagttcaggaaggagttcaaggagaagaaccccaacaacaaggctgtctctgttgtgagcaaggctggtggagacaagtggaaatcaatgtctgatgctgataaggcaccctatcatgctgggccatcaagcgtaagactgagtacaccaataacatggacgcctacaacaagaaacagatactggt

SEQ ID NO: 2323 - DNA, 344 bp, Lilium asiatic
  modified_base (86)..(86): a, c, g, t, unknown, or other
  modified_base (269)..(269): a, c, g, t, unknown, or other
  modified_base (272)..(272): a, c, g, t, unknown, or other
cggacgcgtggggcgaaatggtttgttagggattactatgtcagttgggagatgaagcacatacatatgttcattcggtcagtcanacgtgggaaaagactgaatgcactttgatgttgaactcatgtgttgaaggaagggatgcaccggacctgaacttattagtaacttgttccaagggcgttgtgtacttgaagtcttccagtacagttgggcatgctgtggatgactgctccatcttcaaggttatatcaccagtcatagacganatnggggttcataatgtggttcagtttcacaatgtggtccacattgtgatatatgacaatgctatttgtgcatct

SEQ ID NO: 2324 - DNA, 413 bp, Lilium asiatic
  modified_base (406)..(406): a, c, g, t, unknown, or other
gaactataaagatatgggatgctgggaggaaatgtttgaagttgattcaagaagttcgtgaacacacgaaggcagtcacgagcctttacgtttcatcctcagacaacaaattgtacagtggttcacatgataaaacaattcgagtttggacaattggagcagaagagattcatagtgttcaggttcacgacatgaaagacacagtgaattgcttagccattaattcaaaccttgtttgttttgcttctcaaggaacgggtgctaaggtacacaagtggagcggatcttcgaagcatgtaaacttcaacagaactgtcaaaatctgttgctatgacagagcagaatgcatactgtgggtgcactggctacagcatccaggaaatagatttgtccaactgcacatcanatacatt

SEQ ID NO: 2325 - DNA, 387 bp, Lilium asiatic
ctcgatttggtggagcaattgatgatgctgctcgatacttcaaggatgcacatgacaggggtctcactccttatgagttcgtcgaaagtatgaaaaagaagggaattcgtgtaccagggattggacacaggatcaagagccgagacaaccgtgacaagagagtgcagttgctgcaacaatatgctcacacacatttcccagcggtaaaatacatggaatatgctgtccaagttgagacctatactctcacaaaggcaaacaacctggttctaaatgttgatggtgcaattgggtctcttttcttggatctccttgcgggcagtggaatgttcaacaagcaagagattgatgagattatcgagatcggttacctgaatggactcttcg

SEQ ID NO: 2326 - DNA, 399 bp, Lilium asiatic
acaaggtctagcatctttgacgcaaaggccggtattggactgagctcttcattcatgaagcttgtgtcgtggtatgacaacgagtggggttacagcaaccgggtgctggacctgattgagcacatggccatggtatcggttcgcaactgaagtttgccggcaaagctactgagttcgggattttctttttgttcatctctggggttcgttggtgtaaggtaggcaaaattttgatcgggctgtttgtttggttcttacccaccgatttggaaataaggtgtgtagcccttgaaaggcagtttcaactgtggttgtggaatccgtgttggatcagctcctgcaccatctatggcaaataataattaggtggtcaaacattgaaatgcagagaatttggcg

SEQ ID NO: 2327 - DNA, 423 bp, Lilium asiatic
  modified_base (352)..(352): a, c, g, t, unknown, or other
caggaattattgtcaggtcttcactttggggactagccactggagagaagcaaggtgtccccctccagattcgttttccgatctcagttttcatgcaccttttttccatggggcgatccattttctgtcggattctgagaaccactctgcaaatgatgctatatatgcttttgacaccgagagtgaagaatataggacgattcgattcccggaagactactattttgcaggggaagaaggatcggttcctgaatggacgtggcaatgcttgaatgaatttaaggggtgcttatgcttgacttctaatttcgaaactagcatgcatctttggctcttgaaggactatgccagngggaagtgggtgaaagagtacatcatcgatctcccttgaatgagttctgaatttgcttggggtgaaccctt

SEQ ID NO: 2328 - DNA, 394 bp, Lilium asiatic
ggcatttgccgcaggattcgtttctggattgttttgagctggctgatgatcaggttcaagcgcgcgaatcttatgctgcggtggttaataaggcagttaagggttaccatgaggcgatggaacaaggtctcttgttgaaacttcctttcacaactctcttcgagtatagtcaggtactgcaaatgattgcctcgtctatgaggcctcttggcagcaatgggatgttctatcttgctgctgcagtgtctgacttttatgtgccatgggagagcatggtagaacataagattcagtccagagctggtcctctggatatgcggcttattgaagcaccaaaaatgctcgggatggtgagaaaagagtgggatcccttggcattctgcatatcattcaa

SEQ ID NO: 2329 - DNA, 391 bp, Lilium asiatic
ggattatgaaggcccaagcgctgagggactccagcatggctggttacatgtcaagcaagaagaccatggaaatcaacccggagaactccatcatggaagagctgaggaagcgggctgatgctgacaagaacgacaagtcagtcaaggaccttgtgttgctgctgtttgagactgcactgctcacctctggtttcagcctcgatgagcccaacaccttctgcaacaggattcaccgcatgttgaagcttggcctcaacattgacgatgatgaggtatcagccgatgctgcggacactgagatgcctcctcttgaggaggatgctgagggaagcaagatggaggaggtcgattaactgatgagaaccattgaggggagatggtagtttctatg

SEQ ID NO: 2330 - DNA, 376 bp, Lilium asiatic
atttgctggtggagtggcagcgggtgtcgtcgggcggaggcggcgatgcggtgtcaccgtcgagcgccaatcccgagatgttgatgctggggcggccgatgctggctctggtttcgttgtcggagagcattcttgataagctgccgaaagcttggttcatttacttatttattggtgttggggttattctcttcgtaatatcattctttggctgtattggtgcagtaacgagggctggttgctgcctgtcttgttatgctttcttggtgatcttgttgatcctcattgagctaggagctgctgctttcatattcttcgaccatagttggaaagatgtgattccggctgacaaaactgtggactttgacatgatata

SEQ ID NO: 2331 - DNA, 390 bp, Lilium asiatic
  modified_base (384)..(384): a, c, g, t, unknown, or other
gttgataggaaaaagaatatacgaagcgctacacaaataatctcttgattccaattccgaactactgaaggaaacagatacctaggtccctacaaagaccaatactccacactacatgaaaatgaggcaatagcatgccagaactagaagaacatactcatgtcgacttggccttgattttcttcaccgaagagtaaagaaaaactccagccagagccacagccgttcctagagaattaattctctcacgtaatggatcactctttcataatgataccgcttcagtgatacaaaagaggcataaactgaaattgacgaggcctattgagcctgatctggagaccgcccatcgggtccgtgcagttgtggtgaagagctctgcanagctcg

SEQ ID NO: 2332 - DNA, 389 bp, Lilium asiatic
gttgataggaaaaagaatatacgaagcgctacacaaataatctcttgattccaattccgaactactgaaggaaacagatccctacgtccctacaaagaccaatgctccacactacatgaaaatgaggcaatagcatgccagaactagaagaacatactcatgtcgacttggccttgattttcttcaccgaagagtaaagaaaaactccagccagagccacagccgttcctagagaattaattctctcacgtaatggatcactctttcataatgataccgcttcagtgatacaaaagaggcataaactgaaattgacgaggcctattgagcctgatctggattacccccatcgggttcgtgcagttgtggtgaagagctctgcagagctc

SEQ ID NO: 2333 - DNA, 396 bp, Lilium asiatic
  modified_base (368)..(368): a, c, g, t, unknown, or other
ctcctccgccacatggctgcgaccaagtaggtggatgtccttaaccaagtttggtggatgtcctttttatggtgatgtagggtattgtagagaataaaagtcggcttcatgaactgggagcttttatgctgaggtaacctttgtttagtagtttgtatgggcgtcaggtggtggcccgcattttgcatcggctcttgtgaaaagctgttaaaatctttgaatatggctggtttgagagttttaacttgatatggctgtttgttttagatttgatatattttaattagatttagttctgcatccatcatggtagacctgtgctgcaatgcatgcctggtaaaacctgactttgctttatttgatctggntgcaatcagcccacttcattttttgggg

SEQ ID NO: 2334 - DNA, 402 bp, Lilium asiatic
gcgtccgttctgtaaaaagacttggaaacctactatgagtgccaatgcgaaaaacacatctcgtaagccaaagcgcagatacgcagacaagtagagattcccccggtgcggtctttggagtgctcaagatatatgcagcagaaaccttcatggcaaaatgatgcgtatttaaacagttgcgatatttgaagaatcactgtgtatggggtttggtgagtcatttcctttcgatgtatgatagtcagctacggaaccttcgtcagttatcttgtgcgttagtagtttccaagtgtattcttttgttggtgtatcctgttttatgaataaggtttgttttctaggtatttgtacttggttaaaccaaggggactttcgtaatttatggaggggtaacttacgctt

SEQ ID NO: 2335 - DNA, 382 bp, Lilium asiatic
cttgtagcggcgaatgttgaggcggcggcggatcggcgaaggcgagacttggaagaatcatggctcgaggtttgaagaaacatctgaaaaggctcaatgcccctaagcattggatgcttgacaagcttggtggtgcctttgcccccaaaccgtcttctggtcctcataaagctagggagtgcttgcctctgatcctcattctcagaaacaagttgaagtatgctcttacctaccgtgaagtacaatcaatcttgatgcagcgtcatgttatggttgatgggaaagtcaggaccgacaagacctatcctgctggtttcatggatgttgtgtcaattcctaagacaaatgagaactatcgtcttctctttgacaccaaggggcg

SEQ ID NO: 2336 - DNA, 201 bp, Lilium asiatic
cgtccggggcgatgtccggccgcatgcataccagagtatcttctcgatgtacgcctcccgagacaaactcaaaagcttcttggactagtctctacggatccgcatccctccggattctgcatccctaggatatgatcacctgcactcaaatcctcatcttgaactcattcgagagcctcctcttgagatctttaatctttt

SEQ ID NO: 2337 - DNA, 88 bp, Lilium asiatic
ctcctacggcgcatggatgggaccaactcggtggatgttcttaaccaagcctcggggatgccctttcaatggcaaagtaaggacatcc

SEQ ID NO: 2338 - DNA, 136 bp, Lilium asiatic
gttgatagctgatcgccgcttcaccgtcgccgccaggtgaattcaatcggtttcataccggattcagcgcttatctggaaaattgagaagtaatgtgtgtccatggggtcctcccatggttggagaaatggggttt

SEQ ID NO: 2339 - DNA, 356 bp, Lilium asiatic
ataacagggacaaagaaggataaaaacctagaagctttggatgagggccctgcagtctccggtccaatccaggaatttgaggtttcctagccaatattgactgagtaaccatatcagtgtactcccataagccttcttctcctcctctatctaatggtctatcttcgtccatcttaacagtgaggagcactatgacaagttttagacctaatctagaagagaacggggcgagcaggctaccgtgtagtcttgaactctacaactgacttccttttttagtgcatattctgatacgattgatatcagttcggaacgagagatttgaagcaaatcggtctcgttcattgtctcatcat

SEQ ID NO: 2340 - DNA, 396 bp, Lilium asiatic
cggacgcgtgggaaccaatctcccattggcattatatatgagcttggttcatcagagaggaagtgaagatgtgatgtactatttatctaaggaggctcaagatggaaacgtgaagagtgttctttttctaatgccttgccattccacaccatattattcgactttacacagcaacttgtcgatgcgctctttggactgttctccaagtggtgataagggtgccttggatgagtcggatcatttcatgacagacccagttggctttgtgtccaacatgttcaagaattcctcttgttttcccagccatatagtattatttgatcctgaagaaaggcatctttcacagattctggtttcatattcctacagagaggtaaagagattcttccatgctca

SEQ ID NO: 2341 - DNA, 429 bp, Lilium asiatic
attttagggccccgaatatttgaaagcattaagtcaaatatacgtgaaggcctcatagacctgaggtacctccgagtgttgtttgatcaaataaacccaagtgtagcgagagaaatcaataacaaagctaacatagtaacgaaaaccatataaagatataaggcccccaaatatcaacaaagctaaaatagtaacgaaaaccatataaagatataaggcccccaaatatctgaatgcaataagtcaaataaaccatgcgatagactgttggaaatgacaaagtagtaaacttagccattttgcaaccagcacacaaactacttatactagaaacgacgaggtaaacttaaccactttgcaatcggtacacacgcgacttagactagaaacgtactgtcagctagtcttagcttatgaagtgacaaatga

SEQ ID NO: 2342 - DNA, 257 bp, Lilium asiatic
attatagggccaaaaacatttaaaacctttaatacaaatactcgggggggcctccgcggccaggggggccgccgagagatatcttaataaggatactcaacatgtgcgagagagctcaataacaatactcacatacagacgaccaccagatgaaaatactaagatcctaaagttggagagacatataacgctgactatacccatataaggatataacgcctccataaaactgcaagcaatcattcaaataaaccatg

SEQ ID NO: 2343 - DNA, 345 bp, Lilium asiatic
gtttgacgttctggttgttgcttcttagtttgttctgacatcatctagtacatcttgtggcttgtgtttgttctctgagttgtgatatcggatctgtaccatcaccgttgtgcctggttgtgcaacgagtggtattggatatcattgcttggagtttgtagcagatttgctgcggtttacaacaaggcctccatgggccatactccaccgacgtctacgaccttctctttgaacaatagagtaacgtacttcatcaacccagcttcttcctcaaaggcacacgacaactatatcatcgctctcgtgacctggcgtgttgatagccacgttatggaatgattgacc

SEQ ID NO: 2344 - DNA, 410 bp, Lilium asiatic
cggacgcgtgggcaatatatcttagaatctccacatgggaagacccccttttgatagagaattaagtcagatggagtatttattgcacatattatagctacactccatggagcctcataccttgaatatgttagtctccttcagttatgctggaatgagctacactccatggagctggctgctggctccacacataaagactgagtggcttggcgagagcgacaagagatctaccggttcttcgcctccatgtcagagcactcagatatttaaccaggagtttccatcgctttctgaatcaattgtgattgttggccaacaggagacactccggcaaaatgctggcaccctagctaactacaatgcctctcgctctctgttgctctcaccttcgataaccatgtctttct

SEQ ID NO: 2345 - DNA, 342 bp, Lilium asiatic
ccaagattgaaagggaaggaaaggatattactatagctactttctcaaggatggttggttttgcccttcatgctgccgaaatgcttgcaaaggacggaatcagtgttcaagtgataaatcttcgatcaatcatgcccctagacagagctactatcaactcacctcttccgaaaacaaatcgtctcctaactcttgaccaaggactcatccagcttcgagtaggccctgaaatctgcgcttgctgttattattgtaagctttaaagggttcacagcaccaacattttttgtggttcttttccaacaggccaaatttatcattgtaaagatactcctctttatt

SEQ ID NO: 2346 - DNA, 410 bp, Lilium asiatic
  modified_base (385)..(385): a, c, g, t, unknown, or other
cgctccacggccatggtgaggatgaagcaggtaaagatctcggtaaagaaggacgtggattcgtacacaatccgcggcaccaacaaggtcgtccatgtgggcgactgcgtgctgatgcgggcgtcggactcggacaagcagccgtatgtggcgcgggtggagaagatggaggccgacggacgcggcatcgtgcgggtgcaggtgcgctggtactaccgccccgaggaatccaagggcggtcgccggcagttccacggcgccaaggagcttttcctttccgatcatttcgacctacagagcgcccacaccatcgaggggaaatgtgttgtccactctttcaagaactacaccaagcttgataatgtcgggcctgaggactactttntccgatttgagtacaaggcgggcac

SEQ ID NO: 2347 - DNA, 345 bp, Lilium asiatic
cggacgcgtgggcggacgcgtgggcggacgccaccgcttcgccggcgtctacatgcggatccgcgtgcgcggcggcgggaagacgtcccagatctacgcgattcggcagagcattgctaaggcgctggtggcgtactaccagaagtacgtggatgagcacgcgaagaaagagatcaaggacttgcttgtcaagtatgatcgtactctccttgttgctgatccccgccgttgtgagccgaagaagtttggagggcgtggcgctcgctctctcttccagaagtcttacacgtgagactggttggttatcgatctttgctgattatggcgtttatctgtctttttgca

SEQ ID NO: 2348 - DNA, 396 bp, Lilium asiatic
gtttcttcaagcagtttggggcaattaagaggttgaggatagctcgcaataagaagacggggaagtcgaagcactatggtttcattgaatttgtgaatccagaggtagctaaggttgtagctgatgagattgatgggtatctactatttgagcaccgcctccaaatccatctgattccacctgagcgtctgcatccgaagctatggaaaggtgtaaatcggaaatcccgaccgttcgattatagagaatatgctcggaagcagcataacaaggaaagaacacttgaagaacatcagcggttggtagagggaatactcaaaagagatgagaagagaaggaagcgtctagaggctgctggtattgattatgaatgcccagaatttgttggtaatgctc

SEQ ID NO: 2349 - DNA, 200 bp, Lilium asiatic
tgtgtacttaatatattttgcttatgcataatttgtagggtttatgcgttttctcagttccgatttcataattccaaatgacatgaattatggttgattaatgtcgtctgttcttaagtactttaatttaatatccacttttcttaactccaatgagttagaaaacttctacatctatattttagattttgatcaacact

SEQ ID NO: 2350 - DNA, 339 bp, Lilium asiatic
cttcgttgcaaaaatgctttgaagacctggaatactcatacttggttgatcaagcactgcaatggggcaagcagggaaatatcttaatgaggattcttcacattgctgcttttgctgtatctggatatgcttcaacagagggccgacagtgtaaaccctttaatcctcttctcggagagacatatgaagctgattatccagataaaggcctgcggttcttttatgaaaaggtaagtcatcaccccatgattgttgcttgtcactgtgactgcagaggatggaaattctggggcgattccaatctgaaaggaaagttttggggtcgatctattcagcttg

SEQ ID NO: 2351 - DNA, 378 bp, Lilium asiatic
cacctccattcgaagctaactagcgatgtcgggtctaggaaagggtgggaaggggctgggcaagggaggcgccaagcgccaccgcaaggtccttcgggacaacatccagggaatcaccaagccagcgatccggcgtctcgcccgccgcggcggtgtgaagaggatcattgggctcatctacgaggagacccgcgtgtgtgctcaagatctttcttgagaatgtcatgcgcgatgctgtcacctacacctagcacgcccttcgcaagacggtgactgcgattgatgttgtgtatgccctcaagaggcaagggcgaactctgtacggcttccgctgctgatttatgcagacttttgtcgtgctcgggtctatttactttt

SEQ ID NO: 2352 - DNA, 413 bp, Lilium asiatic
  modified_base (347)..(347): a, c, g, t, unknown, or other
gacccttcgtggagatctgattctgagtcgtgggattcttatgcatattctgctccaagaaatggactcggaaattctaggacatttggggctgcttctattgatggtaggatacaaagaactgatcatgatggcgatctacctggcagcaggcgtgcttgggataaggggcaaggaccatttagacttggtgagggtccatcaacaagaagtgtttgtgcaagcctcaaaggatgaggctactctcgaagcaattcgagtagctggggaagacaatggaacctctttatccgcagaacgaggcgctattcatgacctagatgctgaagcttggtagatgaccatcnatggaatgacatgggacaggtctgggcttcatggactcttgccatggattcacttcatgctggtga

SEQ ID NO: 2353 - DNA, 203 bp, Lilium asiatic
ccgaggacctggtagagcgccttgcgaggtcccaagtcgtcttcctggacggcgaatggtcccctcaagcgtctaaacaagctgtcgccgccaccaaacagatcgttcggcattctggcaccggctacttatccgacttcgagttacttttcgagtgttggtggtggtattattattatttatctaaatggggacacagcaca

SEQ ID NO: 2354 - DNA, 335 bp, Lilium asiatic
actcagtgtcgtgtcaccatcagccctctactgaccacttccctctgaaatctttgtggaagctgtctgtttaattggaacccaccctcatttccatgatgatctgcgtactgtttccattaacacaaatatatgagtacatggaatcccggatcaaattgatacctcgtcacgaaaataagtattatcacggcatatgtctaggattctactcaccttttatggagaccaatcaaaaccatttgaagtggcaccctgtctactagttctgatactgggcggtgcggcattaatccacctgctctgggctggtcacagctaacacatttgcgact

SEQ ID NO: 2355 - DNA, 346 bp, Lilium asiatic
cctttaaatttgcaaccggtgcttcaagaactgggttaacaaaatccttaagttatgaaggtgataccggatcatcaatcagaatttctacgtctggtcaatgagcctgctgagggagctgacagcaacctacttggtcagcttggagatgcaatgccgcaatcagtgacagtaactccagaggagagtgaggccatcgaacgtctggaggcgatgggatttgaccgtgctcttgtactggaggtattctttgcctgcaatagagatgaggagctagcagcaaattatcttctcgaccacatgcacgagtttgaagagtgagcaccccttgttggaagtgtacaac

SEQ ID NO: 2356 - DNA, 326 bp, Lilium asiatic
tcggatgcaccatgaggctctccttgaagccctccctggtgacaatgtgggatttaatgggaagaatgttgctgtcaaggatcttaagcgtgggtttgttgcctcgaactccaaggatgaccctgccaaggaggcggtcaacttcacttcccaggttatcatcatgaaccaccctggccacatcggtaatggttatgctcctgtcctggattgccacacctcccacattgctgtcaagtttgctgagatcctgaccaagatcgacagactctttggtaaggaaattgagaaggagccctactttttgaagaatggtgatgctggat

SEQ ID NO: 2357 - DNA, 298 bp, Lilium asiatic
  modified_base (275)..(275): a, c, g, t, unknown, or other
gatcaatgagccaaagaggcccacagtcaagcccctccgccttccccttcaggatgtgtacaagattggaggcattggaactgtgccagtcggccgtgtggagactggtattgtgaagcctggtatggtagtgacttttgggcctactggtctgaccactgaagttaagtctgttgagatgcaccatgaggctcttcttgaagccctccctggtgacaatgtgggatttaatgtgaagaatgttgctgttaaggatcttaagcgtgggttttgtngcctcaaactccaaggatgaccc

SEQ ID NO: 2358 - DNA, 416 bp, Lilium asiatic
  modified_base (408)..(408): a, c, g, t, unknown, or other
gggacgcttgttgcgtgcatgtcaagtcattatagaagcttatgttgaagcaggcctcgttcttgaaaaggatgctcggcaagcactcaagctacatgctacggtaatgaatgcgaggcataggaaacggaagaaggggactaaatggcgtgattccttcgacgctcgctggattatcaggaggtacggatcggaggagtggggcgaatatgtgatccgagaagcacatctttcacgaagattctcgttcgatgagagtggatactatcattgttgtgcatcgatcccctttcccgaaagcatggatatttaatgactcaccctctgcccccaaggactccaatatcctatgttccaaacttatgccccagtattttggtgcgagtgatacttatgatgttcatgcantctgtagt

SEQ ID NO: 2359 - DNA, 320 bp, Lilium asiatic
gcggggacgcttgttgcgtgcatgtcaagtcattatagaagcttatgttgaagcaggcctggttcttgaaaaggatgctcggcaagcactcaatctacatgctacggtaatgaatgcgaggcataggaaacggaagacggtgactaaatggagggattccttcgacgctagctggattatcatgaggtacggatcggaggagtggggcgaacatgtcatccgagaaggacatctttcactaagattatcgatctatgacagtggatactagaagcgtcgtggatggatccccttatgcgaaagcagggatatttaatgac

SEQ ID NO: 2360 - DNA, 340 bp, Lilium asiatic
  modified_base (270)..(270): a, c, g, t, unknown, or other
acggacttcgatcgtggacaccttggttgctttcgttggctgtggaccgtacgggaatgagtgttctttcgtgcgctacgaatcaacgatgtatgagcggaaagaaaatatatcagctttcgccctctgagaaagatgaggtaaaaagacggaaactcatattggcattatatatggtgagggatccatttttcgccaagtatgccaagcaccaacttgagaaaacagaaggatatttgggcaaggtcccttttcttgggttccttacangtaaacttgtggagcttataacgggagctcaaacaaggtatacctataccctctggttcataaatgtgga

SEQ ID NO: 2361 - DNA, 409 bp, Lilium asiatic
  modified_base (349)..(349): a, c, g, t, unknown, or other
  modified_base (392)..(392): a, c, g, t, unknown, or other
cccacgcgtccgctagttctgccggcggcggcgtgatcggagatcgagtgcgatggccatggaggagccgaagaccgtcatcccggaatccgtgatcaagaagcagaagagagcggagcaatgggccctcgtcaagcaggaggagctcgccgagaagaagaagaagagcagcgagaatcgtaaggttatcttcagccgcgctcagcagtatgcaaaggaatatgaatctcaggagaaggaactcgtgcagcttaagcgagaggctaggttgaagggcggtttctatgtcagcccggaagccaagttgctgttcatcatcagaattcgaggtatcaatgcgatgcacccnaaaacaccaaagattcttcagctcttgcgcttaagacagattntcaatggcgtgttcctg

SEQ ID NO: 2362 - DNA, 379 bp, Lilium asiatic
tcgcggacgcgtgggcaaacttccaggaaatggctaatcaagttgatgagcaaagcgcgggtgtttcggtggaagctaagccacggctcagatggacaccgcatcttcacgggcggttcgtcgatgcagtttcgcttcttggaggagcagagaaagcaacaccgaaggcggtgatgcgagtaatgggagtttctgggctgactctgtaccatttgaagagccatcttcagaaattcaggatggcaaagagccaacatatgaacgctaatgtgaacatcccgcataacgatgagaagggacagaattgtgtgtcagttgatttaaggaaatatgatatcgaaactgcctgttctaaaattgatcagaggataccagacac

SEQ ID NO: 2363 - DNA, 361 bp, Lilium asiatic
cggacgcgtgggggctgagttctttacaaggtagatttatacctaccaaacaagaaaatgttgtgatgatggaagagccgtggataaatggaatttcatgcattttcagtgggaacatgggaaggctagaggcagatgcatgtaaagaagacattccttctaaaaatggcatttggaaaaacgaggttaagaacgaaactgatattcccacttgcttggagaacataacaagggaggacatggagattgttcttttgggaacaggttcatcccagccatcaaaatatctgaatgtcagatctgtgtttattaatcttttctctaaaggaagcttacttctagattgtggtgaaggaacatt

SEQ ID NO: 2364 - DNA, 388 bp, Lilium asiatic
ctgtatcctaattgccctgcagcggtaagacttggtataggtctatgtcgctacagacttggtcagtttgatagagcgcggcaaacctttaagcgggtccttgagatagatccagaaaacgttgaggctctagtggcccttggtgtcctggatttacaagcaaatgaagttcaagatagtcaagaagcaatggagaagatgcaaaaagctttcgagatatacccttattgtcctacggctctgaattacttggcaaatcattttttctttactggtcagcattttttggttgagcagcttactgagtctgcacttgctgtgaggaatcacggtttggtgaaagcacattcttactacaacctggcaagatcttatcatagcaagggag

SEQ ID NO: 2365 - DNA, 395 bp, Lilium asiatic
cgccctctgtggatggaattccctaacgatagaagcacattcgataacggcgaagcattcatggtcggagcaagtcttttagtccaggggatttacgaaaagggccaaaagtctgtgtcagtttacttacctggggagcagtcttggtacaacttaaaagccggagctgcatttcgcggaggtgtctctcacaaacttgaagtttcagaggatagcataccaagttttcagagggcaggtagcattgtacccaggaaagacagagtcaggagaagttctactcaaatggtgaatgatccctacacgctggtatgtctttttgtaatgacagtctgcctacattgtatgttattgtgaagtaacaaggtatctaatcacttatttctgatgtgaat

SEQ ID NO: 2366 - DNA, 399 bp, Lilium asiatic
gtcccacgcgtccgcttcttttcttcatctcggtagtatatattcgttacacggaatattttgactgcctaattcttgttttctgcatctcagtagaatatattcgttacacggaacaatttgaatgcatctgaacttgttaatgttaaaatgctagaaaaactccatttaaagttcacaaaagggaaacaaagataattacatagtttcattctaaaatgcatttagtttagtgcttaagtctaaagccctaacaaattatatgttatttgcttcgattttgacagtgtcgtgaagaaccatattagccctcactaagatcttcggaaaaatatctgtcttgctttctctaccaatggcttggttttcatgataattcaaattgagtttcacccggat

SEQ ID NO: 2367 - DNA, 310 bp, Lilium asiatic
aggacgcgtgggttcggaattggctgcaaatgcagcccgggacaacaagaagaaccggattgttcctcgacatgtgtgtctggcagagaggaatgatgaggagcttgggaggttgcttggtggggttactatcgctcatggtggaattttacccagcatcaaccctgtccttctgacgaacaagactgggaaggaaggggtggagcccaatagttcgaagaacgtggccaagtccccaaagaaggcttaaatctgtgctataggactcgtcgcactatgagaagacttaaatctgtgctctgggactgtt

SEQ ID NO: 2368 - DNA, 341 bp, Lilium asiatic
ctttcgctcattggagctgtaacagcaataacttacgccaccatggcctgggtcctctctgttagccaagaaaggccaccctcgatttcttacctgcccgtaggatccccttcctttgccgcctcctttttctcaatactaaatgcacttggcatagttgcatttgcattcagaggacacaatcttgtattagaaattcaggcgacaatgccgtcaacttttaaacatcctgctcatgtgcccatgtggagaggagtcaaggtcgcgtatcttctgattgccttgtgtatattccctgttgccattggcggcttctgggcttatgggaaccttatgcctgc

SEQ ID NO: 2369 - DNA, 347 bp, Lilium asiatic
ggaggtgatttggcgagggtgcagcgtgcggtctgcatgatcagcaacaacacagctgtggctgaggtattctcacgaatcgaccacaagtttgatctgatgtactcgaagcgtgcttttgtgcattggtatgtgggcgagggcatggaagaaggggagttctcagaggccagagaggatcttgctgctcttgaaaaggactatgaagaagtcggagctgagggtgttgaagatgatggggatgagcctgaagactactgagttctggtcttgggcattcataattgcttttatgatattctgtatgttggattatttgtgtgtgcatcaccagtattggcttgatc

SEQ ID NO: 2370 - DNA, 330 bp, Lilium asiatic
cacgccgacccacgcgcccgctggtttaatttcagcatataaatggattttctccttgacattgtgatggggtttctatactactatccacccccccattcaataccttacggttctacgcttgattacaatggcctgctttagggaggtttgaccctcctatccacaaaatcagcatattccaaatgctcagatccaagaactaatgatactcaattgacttctggtacttgagaactagacccgacgtaaactatcatgccagctagaaacctacatgatcctcttccactcagtctagtagtgactcaactcgccacataacataca

SEQ ID NO: 2371 - DNA, 268 bp, Lilium asiatic
  modified_base (102)..(103): a, c, g, t, unknown, or other
  modified_base (111)..(111): a, c, g, t, unknown, or other
  modified_base (118)..(118): a, c, g, t, unknown, or other
cacgcgttcgggaggtgatttggcgagggtgcagctttctggctgcatgatcagcaacaacacagcgggggcttaggaattctcacggatctaccacttttnnaatctgtngtactcnaagcgagcttttgtgcattggtatgtgggccagagcatggaaaaaggggagttctcacaggccacagaggatcttgctgctcttgaaaaggactatgaagaagtctgagctgatggtgttgaagatgatggggataagcctgaagactac

SEQ ID NO: 2372 - DNA, 182 bp, Lilium asiatic
cagagagaggcaagctttcgaagagtcttacaagtaccctagagatactgaaagactgtacggaaacatggccagaactccacaactcgcctcagagagtcccatttgccaagcaaggaaaattcgtcagaccaaatatgccctatgaaaatggaatcataatcgacggctaccaacccaga

SEQ ID NO: 2373 - DNA, 258 bp, Lilium asiatic
  modified_base (81)..(85): a, c, g, t, unknown, or other
  modified_base (92)..(92): a, c, g, t, unknown, or other
  modified_base (94)..(95): a, c, g, t, unknown, or other
  modified_base (113)..(113): a, c, g, t, unknown, or other
cggacgcgtgggcgcgtctccggtacatgttcaaatttaacggactggagtctgaggagaactagttatagcttgcacacnnnnnatatgananncatgacaatcgcttttgngcattcgtatgtggtccatatcatatattaaagggaactctcataggccaaatacgaacttgcttgtcttgaataggactatgaataaatctgctctctgcgtgttttaaaatgatggtgttaatccttaatactacttcattct

SEQ ID NO: 2374 - DNA, 326 bp, Lilium asiatic
cacgcacctttagtcaaataaccccttgcaatcagatgatgaatgtatcaagatagctgactttcgaggacctggcagtgaagtaaaaactgatgggataacacctggaacggtaacctatcgttgtatggcacaagatatgattcatgaccagccatattaccaagaagttgatgtctacagctattgcattgtgctttggtagctcataactgacatgctgcattttgctaatatgacagcattgcatgatgctttcgatgcggtgaaccaagatatgcgcccagctgtacactaggactgcatgcgcacacttgctgacatca

SEQ ID NO: 2375 - DNA, 395 bp, Lilium asiatic
tctggtgttcccgggtgtgagccacgcgtcacgtgatagttaaatctgtttctctaccgtctggtcatgataaagagggcagagattatggattcttgggttcatcagctaacccaattgaacaaattaaagaacacatgtttttgtctggcaagggattaagaaaatctgtggttgactatgatgcaaataatgaaaatgttcttgctgaacagtttgcagctaaaagagtgaggaagccaactaaaaggtatattgaagagctttcatatgttgagacaagggatttttcagacacagattctggacatgatcagtcgtctccgatttcttcgaattagattcttctgagaacaatattttgaagggtactactatcaccatgcaggactcgt

SEQ ID NO: 2376 - DNA, 402 bp, Lilium asiatic
tccaccagagcctgaaagcatggaaagcgggcagcctcataaaacggaagaccagatgctgttatcaaatggaactgacgagtcaaaggattgtgctgagaagaatgaacagaacgatgttcaggaggcaaagcaaacagaaccatctaattcctcacagaatccacctgatgaaaacaagttagctgaatctgttcctccgttagaggcaactgacatgaacactgagatttcacgtgatcaaactttggaagagaagcaaatcatggctactgataatgatgctagtgtctctgttttgcccatgatgcttccattaggcagcgtgaaagaatcagcagattttgttttacaaggggaagatacgacaagtactgcaatggaaacaaattatcttgacat

SEQ ID NO: 2377 - DNA, 393 bp, Lilium asiatic
gacataatacatgtttttcatgattccgatcaagaccagaatgatggagaaccaaatcctcttatggttcatctgcatgaggaagagcaacctactcaagagcagattatgagtaagtggttcagtcaagatgtctttgctgaagcggaagaaggtgtatttgagaagagtgacagtgaagatgaggaaaaggaagaagtactccagattccgaagaagccaaaagtaaaattaaccagtctgaaaaaggactcaagtccccctaaatctcaagtcttgcagcaagaagagtttgagatagtaccagaagagccgatgcaatcgagtgatgactcgtcatccgatgaatcagaagatttggatgaagaccagaaggccgagatacttgcttat

SEQ ID NO: 2378 - DNA, 334 bp, Lilium asiatic
  modified_base (276)..(276): a, c, g, t, unknown, or other
caggcatcttaagtcaaataaccgcttgctatcagatgatgaacatatcaagataggtgactatggagggcctcggattgaataaagagctgatgggatgacacctgaaacagagaacctatcgcagggaggcaccagagatgattcatcacaagccatatgaccaaaaagattatctctacagatttggcattgtgctccgggagctaataactgacatgctcccttttgctaatatgacagcagtgcatgatgatgaagctccagagaacatgngtgatcgtcaacctgtaccccaggactgcactgccactcttgacgacatcatgaacag

SEQ ID NO: 2379 - DNA, 166 bp, Lilium asiatic
atcatcttgggttgcacaaagcattgtgcgtacttatgggttggaactatgcagcacctgacaactccaagtcatataaatcattatctgatgatgatattgcggcaaatagggctgacctgattttatggccaccaacagtgataatccataacacaattacagg

SEQ ID NO: 2380 - DNA, 215 bp, Lilium asiatic
  modified_base (85)..(85): a, c, g, t, unknown, or other
  modified_base (95)..(95): a, c, g, t, unknown, or other
  modified_base (114)..(114): a, c, g, t, unknown, or other
accagctatttctactcggatccgatctatttacaagcccaacaggaggcagatgaggtgatggcgaggagcgacagctgccttncgcgcggggntgccggaaatgctataggnggcgcggtcggcggaacccgcggggcttgctatggaacttttgaagcgttcagatacaagatccctggattgctaaagatcagatacattgggcaaaccac

SEQ ID NO: 2381 - DNA, 353 bp, Lilium asiatic
gattcacacatggagagacgtcagtcaaagcatatgtggctatcaacttatctctgggcgatcgtcctcttgctgctcagttccaagaaattcctctggacacacggatgattgaagccgaacgagttggatatgaaattttagaaaagactgtagtggacaaactcccgaatgatctggaaggaatggaggcttcaatgaagagactgctggctttgattgatgatgtctataaatatgtggatgatgttgttgaaggacgtttgcccccggacaataatattgggagagtcatagctgatactttggcatcagttccgaaaatacctcctgctgtttttgataagctcttc

SEQ ID NO: 2382 - DNA, 335 bp, Lilium asiatic
  modified_base (83)..(83): a, c, g, t, unknown, or other
  modified_base (265)..(265): a, c, g, t, unknown, or other
gattcacacatggagagacgtcagtcaaagcatctgtggctatcaacgttatctctgggcgatcgtcctctcgctgctcatgnccaagatatgcctctggacacagtgatcattgaagccgaacgagttggatatgaaattttagaaacgactgtcgtggacaaactcccgaatgatctgtaaggaatggtcgcttcaatgaacagactgctgactttgattgatgatgtctatacatatgtggatgatgattgcgaaggacctnttgctgtcggtcaatcatatcggaagagtcagacctgatactttggcatcagttacgaatatacctcctg

SEQ ID NO: 2383 - DNA, 285 bp, Lilium asiatic
tgatagttaaatctggttctctaccgacgggtcatgataaagagtccagagattatctattcttgggttcatcagctaacccaattgaacaaatcaaagaacacatgtttttgtctggcaagggattaagaaaatcttgggtagactatgaagcaaataatgaaaatgttcttgctgaacagtttgcagctaaaagagtgaggaagccaactaaaaggtatattgaagagctttcagatgttgagacaagggagtctacagacacaaattctggacatgatcagt

SEQ ID NO: 2384 - DNA, 376 bp, Lilium asiatic
gatagcccccgaaggcagtttcgcctggcaggacatttcagttgtgttgcttttgttggaagctcttggcttttgtatgcaaccagcaagagatggtcctagtcatactatggggaggactgtttcgaagggagcatggtctcccatcttatgattctaagtctcctacaaccatagagatgggagtccgaatggttgacctgagtctctcaggttgttattatgctggtcttgccagggtgggggctctgtattacctgacatgcattttgaggctgtgcttgttatcattattgttcgacctttcgttgctaaccctatttcctttttgaaaaaacatctgctcgacctcataattttttttctttcttttaaa

SEQ ID NO: 2385 - DNA, 406 bp, Lilium asiatic
ggatgctaagccagctacctctttggacggagctatggctactaaagacgtgccaaaggatgcaatgactgccaagcaagccaaggatgcttcagaagaggaggggacggtgttatcgatcggaccacttatggttgctgttgatatcataaaggaaacaaagaatgcaatgactactaacgaggccggagaggcagacatcaccgatataccaaagaatgcaacgatggctaaagttgccagcgaggaatgtgctccatctctaccatcactagggaggccaaagaagactggccttcatcttttcttcatgaatataagacacgtcctgaagcttgatgctctggggtcagaaattgcgcggattgcgataccagcagcgctggctttggctgctgacccactt

SEQ ID NO: 2386 - DNA, 399 bp, Lilium asiatic
gtggagttgaactgtgagtcaaggttctgtgtgacagacagaacttgtctctgtaattcatcagggttggctttcttctctataaggggcaaagcccaagctctgtaagatatgtattattttgaatgaatcaatagtgattgtctcttttgaatgcttgattgtcaatcatttacaagactaatctctgcaggtgacccatgagaaaagagatgagaagagaaggaagcgtctagaggctgctggtattgattatgaatgcccagaatttgttggtaatgctcagcctgcaccaaagaaaattaagtttgctgatgacgacggtgatgagtagagaagttgtcaggcatccttcttccgctacactataacaggattttggaatcatgtgaaagctct

SEQ ID NO: 2387 - DNA, 421 bp, Lilium asiatic
gctgaagaaacttgttttctgaattattatttgtaatatgaaaatttgtttgtctgatctggttatttttttgctgttatgaattagggcgaagtagtctctaaacaatgagttcaccaagtggtttagagttatatttttctagacatattatgatctatcttgacttggtgccttgggatacctttatctacagggaaaatgatattgaccagagtaatcattgagttatttaacgggtttgttctatatgagtaacccttattcctaaccatggtttgtatttctaataaaaaataagggaaaaatgagttttgtaggagattgtatttgtgtggttgaattcttgattgctcacaaagaggtatttatatgagtttcaagtattttgtgtacaccatatttattgtacttaggtatt

SEQ ID NO: 2388 - DNA, 343 bp, Lilium asiatic
  modified_base (81)..(81): a, c, g, t, unknown, or other
  modified_base (85)..(85): a, c, g, t, unknown, or other
gtccgcctcctcctcgaccgcggatacaccgtccacgccgctgtcaaagatctcggggacgagagtgagacgaagcacttnctanccctagacggcgcggaatcgcggcttcgcctgttccacatcaatctcctggatgcagcatcacttgttgctgcgattcgcggcaccgtgcggcgttttccatctcgcgtcgccctgcaccgtcgacagagtcaaggatccggagggggagctgttgcatccggcagtgaaggggacactcattgtgcttcgtgccgcaaaggagagtgggatcgggcgggttgtggtgactttcatcagtctccgtcatcattcccca

SEQ ID NO: 2389 - DNA, 308 bp, Lilium asiatic
aaccggcccacgcgaacattaacgcgaagaatgaacattgcgatgtaacaagtggacgattattagatcggttcggattagagctggaatatgttcatgacaagcttgcaccgcatatattaaagagtgactttcttggaccatatgttgtcaacctaaacttggaagcatgtgatacgccataatacaagagaagacggcctttatcaaagatacaagcttacgaactcacgcgtgcgacctaatagagctacccttatgtcacaccaatgcaagtcactgtgcaacaaaatacaacgaaaagactg

SEQ ID NO: 2390 - DNA, 189 bp, Lilium asiatic
  modified_base (99)..(99): a, c, g, t, unknown, or other
  modified_base (156)..(156): a, c, g, t, unknown, or other
cgtacgatcggtgcgatcggcttggcatcgcggctaggcggagttcatacagactagttgaagagatgtgccatgatgagatgggatgtcaagcggttnatgaagccccgatcctctgtgtcaataacagtgggttttttggccgtgctgcgaccntgaacatgtgctctaagtgctacaaggatcatg

SEQ ID NO: 2391 - DNA, 204 bp, Lilium asiatic
cccacgcggccaccgactcgtggacggactcttggcggggcttaacatcccgtcaaagggtcgctaaataaagggtatggtaaaagaatgactgcttcacatgctctccaacacccttggatcctagattctcaagaggctaagattacactcgacgttataactcataatcttgtaaaggctcacatatattcatcttctata

SEQ ID NO: 2392 - DNA, 245 bp, Lilium asiatic
cacgcgttcggtgcattatcttatggccataaatccccacctggattaaatgcgagggtcatgccgtttggtaactaacatgaagaatcgtgcgcacacactaatttaaacaatcctgttgtggcagatgcgcaccattgaacaacaactaaccgatcgtgcatcttttgttgaaaaatatatggctttgttcgatacaatacggactgcccttgaatgtggcttggcactcacatgtgcgtaga

SEQ ID NO: 2393 - DNA, 198 bp, Lilium asiatic
  modified_base (94)..(94): a, c, g, t, unknown, or other
tcggtggtatgatcgaggtttgtggtggcgcgtgcacagtaggaggtacgggtggttattattagggctgagggggagagtgagtttgcgaagntgatcttggatgctactgtttctgttgggatggggttgatggagatctggtgcattgaggctgttcgggagatcttggttacaattgcgaagtcggcgaatgtg

SEQ ID NO: 2394 - DNA, 342 bp, Lilium asiatic
  modified_base (7)..(7): a, c, g, t, unknown, or other
  modified_base (114)..(114): a, c, g, t, unknown, or other
  modified_base (143)..(143): a, c, g, t, unknown, or other
  modified_base (198)..(198): a, c, g, t, unknown, or other
  modified_base (223)..(223): a, c, g, t, unknown, or other
  modified_base (299)..(299): a, c, g, t, unknown, or other
cccgggnttttttttttttttatatatagatcacgttttgtaattcgcattcacatacattttttgttcggttggatctgcagatctaaaaattccggaccccccctcccaaancgaaggaacaataattccggacccccccnaatatcaaatcctggttccgcccctaggcaaagcccccacctccttcatcgctcntatccctcagtagccgaagacgttnttcctccactctcgccgcccgtgggcgagctctgtgttgaatcccagacggcagctcctagagttgaggatccacncttcagcggattgtaaaccctggtaaaagaggaaactgagaga

SEQ ID NO: 2395 - DNA, 346 bp, Lilium asiatic
  modified_base (4)..(4): a, c, g, t, unknown, or other
  modified_base (98)..(98): a, c, g, t, unknown, or other
  modified_base (207)..(207): a, c, g, t, unknown, or other
  modified_base (233)..(233): a, c, g, t, unknown, or other
  modified_base (310)..(310): a, c, g, t, unknown, or other
  modified_base (338)..(338): a, c, g, t, unknown, or other
cgtncgatcgggaggatcggcttggcatcgcggctaggcggcgttcatacttactagtagaagagagcggccatgatgagatgggatgtcaagcggcnctatgaagcccccatcctctgtgtcaatacctgtggcttctttggccatgctgctactctgaacatgtgctctaagtgctacatcgatcaccccccccccccccccccncccccccccccccccccccccccttnccagcattgtgaatggaggcggagcgcccacctgctgcggagttaaacccccccccccccccccccccccccccccncccccccccccccccccccccccccccncccccccc

SEQ ID NO: 2396 - DNA, 235 bp, Lilium asiatic
gtatgctgctctgttcagttgatacgcctgttcaaatcttgaagagtacaaactttaacggatggtcggccgttcatgatgaagaaattgaagctattattccctgtgtagcatacgcccttgccaagatccatatgcatcttgtagtttgtgggctttgttacacagcaagaagaggcttttgttactttgaaaaagacatacttgaatttggcacagacgactgtgaagatat

SEQ ID NO: 2397 - DNA, 403 bp, Lilium asiatic
  modified_base (373)..(373): a, c, g, t, unknown, or other
gtacttatgaaaggccagctggttaaaggtttgctaccacacagcaacatcagggcggattacactgtacaaagggtcgaagagcttgccgaaggaacatgtttgaagaattatgattacacgggaaatggagatggttatggcaaagctgagaagaggtgggcaagcgggctttcttgtgactctcacttgttgttgtatctattctgtgctttcttggagcatcctaaatggatgttacatgttgatccaacctcctattatggtgctcaatctagcaagaacccattattcgtgggaattcttcctccaaaagataggtttcctgagaagtatgtggctatcatatctggtgttccatctatcattcatncgggagcttgtatactaagtgttgggaagc

SEQ ID NO: 2398 - DNA, 185 bp, Lilium asiatic
  modified_base (80)..(80): a, c, g, t, unknown, or other
gaggttcgtggtggcgcgtgcactgcaggaggcactgtcggcttttatgcgggctgctggggggggtgagtttaagaaantgatctctgatgctactgctgctgttgggatggggctgctggagatccggtgcatcgaagctgctctggagatctcggttacagccccccccccccccccccccc

SEQ ID NO: 2399 - DNA, 271 bp, Lilium asiatic
  modified_base (6)..(6): a, c, g, t, unknown, or other
  modified_base (61)..(61): a, c, g, t, unknown, or other
  modified_base (92)..(92): a, c, g, t, unknown, or other
  modified_base (121)..(121): a, c, g, t, unknown, or other
gcgacntctccgacgacgtatcctctcccgcgaagcgcggggaggaagcatcagcagcagntgatgaagctgcttcgacagcccgactgtgnccgcagcgacggccgaggtccctatcaangcaggcccgcatatctaaggccaggcggaacaaatgctgcatcaggatctgcatctgccgagtttggaacaacgaagggcattgcttctgtgtttggtcccaggcaaagcaagaaagccatgatgtatagcgacatcggtaggttgaact

SEQ ID NO: 2400 - DNA, 319 bp, Lilium asiatic
  modified_base (92)..(92): a, c, g, t, unknown, or other
  modified_base (121)..(121): a, c, g, t, unknown, or other
  modified_base (149)..(149): a, c, g, t, unknown, or other
  modified_base (176)..(176): a, c, g, t, unknown, or other
  modified_base (200)..(200): a, c, g, t, unknown, or other
  modified_base (225)..(225): a, c, g, t, unknown, or other
  modified_base (251)..(251): a, c, g, t, unknown, or other
  modified_base (299)..(299): a, c, g, t, unknown, or other
cggacccgtgggcaagtgtgaagtagcaccgggttgtggagaatggaagaggccaatgaaggcgaacccagcgtacaaagggaaatggaatnctcctctaatcgataacccgaactacaanagcatctggaaaccacaggagatacctnatccggactattttgagctggacaganctgactttgagcctgttgctgctnttggtattgagatttggacgatgcncgatggtgtgttgtttgataatatcntgatagccagtgatgagaaggttgcagagacgtaccgtgagaagacanggaaaccggagtatgatgct

SEQ ID NO: 2401 - DNA, 381 bp, Lilium asiatic
  modified_base (79)..(79): a, c, g, t, unknown, or other
  modified_base (213)..(213): a, c, g, t, unknown, or other
  modified_base (239)..(239): a, c, g, t, unknown, or other
gtccataaccctgctggtgagctgcagcgtcaaatccgcacttggcgtgcagagaattttgagttcctttcggttactngtggtgataaccaaggggggactaccgggcaattggaactagtatccactgcaattaatgatggatggatggccggccttggtgctgcacaacctcccagtacagatgctttgggccagcttttgtctgagtanacaaagagagtttatacatcacaaantcaacacttgaaggatatagcagggtccttggcaaccgaggaagctggagaccaaatccatgtaaataagttacgttcagccttagagtctgttgatcacaagagaagaaagattttggaacaaatgagaagtgattcggct

SEQ ID NO: 2402 - DNA, 431 bp, Lilium asiatic
  modified_base (47)..(48): a, c, g, t, unknown, or other
  modified_base (79)..(79): a, c, g, t, unknown, or other
  modified_base (109)..(109): a, c, g, t, unknown, or other
  modified_base (137)..(137): a, c, g, t, unknown, or other
  modified_base (188)..(188): a, c, g, t, unknown, or other
  modified_base (240)..(240): a, c, g, t, unknown, or other
  modified_base (288)..(288): a, c, g, t, unknown, or other
  modified_base (313)..(313): a, c, g, t, unknown, or other
  modified_base (336)..(336): a, c, g, t, unknown, or other
  modified_base (359)..(359): a, c, g, t, unknown, or other
  modified_base (386)..(386): a, c, g, t, unknown, or other
  modified_base (415)..(415): a, c, g, t, unknown, or other
ggcgccaagatgttgcagtcgttgaatcctgtgaagcagttcaagcnncacacatgcagcttcactctgtttgcgtcgngtccagtcgagcagaggatgccgatgccgncagccccgacgtgtcggcgagccgcacnccgtacccctctgctgccgatagcggagccgccgctgggtagaagaacgcnagcgtccctgtggtgaagagggaggtcggatgaggggagaatggaggaaganggtagaggagcagtccatggagaacggtgcgccgcccgcgggtgggcngcgtaggcagccgcggagcggggangagcagagtcggaaggtgtgganggacacggagggtgagcatgtgnttggatgactatcagcaaatgtgcatntgaaagatatttgtactgcttccattttngttaagccacatcacg

SEQ ID NO: 2403 - DNA, 433 bp, Lilium asiatic
  modified_base (55)..(55): a, c, g, t, unknown, or other
  modified_base (86)..(87): a, c, g, t, unknown, or other
  modified_base (116)..(116): a, c, g, t, unknown, or other
  modified_base (220)..(220): a, c, g, t, unknown, or other
  modified_base (247)..(247): a, c, g, t, unknown, or other
  modified_base (271)..(271): a, c, g, t, unknown, or other
  modified_base (294)..(294): a, c, g, t, unknown, or other
  modified_base (319)..(319): a, c, g, t, unknown, or other
  modified_base (341)..(341): a, c, g, t, unknown, or other
cgcgtccgcggcttgaatggacttgctttacagttcaacgaggcctgtaaagggnttctgcaaaaccttagatcgacgctcccagnnatgaaatactctatagggagttcctatgntgttgtgcagaacataattcgcaaccctactgcgctaggttataaagagattaagactgcgtgctgtggatctggaaagttcaacggcgagtctggttgcaccncgaatgctacgttctgctctaatcganatcaatacctgttctgggatctgntgcatccgacgcatgccacatcnaaacttgcgggagtggcgatttacnatggttcagtgaagtttgcatncccaatcaatttcaagcagttagtcgaggatgagacgtaatgaacgtaagtgcgatgatgcggtatagataagtgatgcgtcctgcaaaata

SEQ ID NO: 2404 - DNA, 430 bp, Lilium asiatic
cccacgcgtccgccggaaaactttgaatatctggttcttacactcagtcatatgtacccagattatgacttcaggtacctctgttcttttacatcatatgctaaattaataaatacctgggaggaaagattctgggtaatgtcaatgtcagcttgctaggcgacacgacatcccgctatatatctattctttaccagtactggaagtgttgtcaaatggcttgacaggcgggttttccgttgctctatgagctgagagttcaagtctctccattttccataaataattatctttgcgattgtgacggaatggagttgagttgcaattactttgtttaattcttggaatgctttatttgggatacatgaacacgatcaaggtttatctaattccttagcaatgcagtgcaagctcatcgtttttttagaga

SEQ ID NO: 2405 - DNA, 378 bp, Lilium asiatic
  modified_base (72)..(72): a, c, g, t, unknown, or other
  modified_base (102)..(102): a, c, g, t, unknown, or other
  modified_base (156)..(156): a, c, g, t, unknown, or other
  modified_base (180)..(180): a, c, g, t, unknown, or other
  modified_base (205)..(205): a, c, g, t, unknown, or other
  modified_base (256)..(256): a, c, g, t, unknown, or other
  modified_base (304)..(304): a, c, g, t, unknown, or other
  modified_base (327)..(327): a, c, g, t, unknown, or other
  modified_base (352)..(352): a, c, g, t, unknown, or other
cagcatgatcaaccaagaacggtcgagactctaatccgaagcacctgggagtgaagaagttcgctggagaantagtgatacctgggaacatcattgttcggnaaaggggcacgaggttccaccccggtgactatgtcggaatcgggaaggaccatnctctgtatgccctgaaggaggggncggtgaaattcgagcgtaacaagcntagcgggcgcaagtgggtgcatgtgaaccccaaggaaggccatgttctccnccccctatacgccacagcggctgctaaagacgaggagaaagctcaaangtgctgagtttgtttgcagttancttttcggtgatggcttgagcaaanaatgttataatgtttgcttttgctga

SEQ ID NO: 2406 - DNA, 446 bp, Lilium asiatic
cggacgcgtgggttgcgggacaaatacagtcttgcagcagtaacaaatgatatatttacaaaagaggatggagaattcctagtgaagcatggagcacttcccgaggaaaggatccgtgcggttgaaacaggaggatgtccgcatgctgctatacgtgaggacataagtattaatttaggccctcttgaagagctctcaaatttgtacaaaacagacatattactatgtgaatcgggaggagataatttagctgctaacttcagcagagagctagctgactacataatttacattatcgatgtctccggtggtgacaaaataccccgaaaagggggtcctggaataactcaagcagatctgctggtaataaacaagacagaccttgcacaagcagttggagctgacttgtcagtcatggaacgggatgcacttcggatgagggatgg

SEQ ID NO: 2407 - DNA, 328 bp, Lilium asiatic
  modified_base (61)..(61): a, c, g, t, unknown, or other
  modified_base (91)..(91): a, c, g, t, unknown, or other
  modified_base (148)..(148): a, c, g, t, unknown, or other
  modified_base (224)..(224): a, c, g, t, unknown, or other
  modified_base (250)..(250): a, c, g, t, unknown, or other
  modified_base (297)..(297): a, c, g, t, unknown, or other
  modified_base (322)..(322): a, c, g, t, unknown, or other
cgactattttcggtcgccggagcccctcaaatgtgatcaaacctccttcatattacacccntagaatcacattgatctcctgatcatttcncctttgttaatttctaaatctactatggacattatgagttctcagcaccttcgttcnccgaccattctctggagatctccggtcacctcgtctccgactgattcactaccccgggagctaatcacatgtaagnttcatccatttgaagattatctaatncactcatgttttatttcaggggagtgccggtaaggatcgaaatcttnctaggggcactagcaaggagcaganaagatg

SEQ ID NO: 2408 - DNA, 376 bp, Lilium asiatic
  modified_base (78)..(78): a, c, g, t, unknown, or other
  modified_base (108)..(108): a, c, g, t, unknown, or other
  modified_base (136)..(136): a, c, g, t, unknown, or other
  modified_base (212)..(212): a, c, g, t, unknown, or other
  modified_base (285)..(285): a, c, g, t, unknown, or other
  modified_base (332)..(332): a, c, g, t, unknown, or other
  modified_base (355)..(355): a, c, g, t, unknown, or other
gccctctccgccggatatgatctctccagtgctgtggagacgaagggtccagctcgagggaaagctctggtaccgacngacctcagcattgccatccctgaggggacntatgctcgcatcgcgcctcggtctgggntggcatggaagcactccattggtgttcgagcaggtgttattgatgcagaccatcgagggccggtgggtgttgtatngttcaaccattctgatgttgattttgaagtaaagcctggggaccggattgctcagatgatcattgagaggatnatgacaccggatgtcattgaggtggaggacttggattctactgttangggtgttggtgggtttggatccnctggggtgtgagtctgaatat

SEQ ID NO: 2409 - DNA, 411 bp, Lilium asiatic
  modified_base (78)..(78): a, c, g, t, unknown, or other
  modified_base (108)..(108): a, c, g, t, unknown, or other
  modified_base (163)..(163): a, c, g, t, unknown, or other
  modified_base (213)..(213): a, c, g, t, unknown, or other
  modified_base (312)..(312): a, c, g, t, unknown, or other
  modified_base (358)..(358): a, c, g, t, unknown, or other
atctacaccgctgcagtgagaggcgcgagtgagaatcggccgccgccaccggaggaggaagaggttgttcaagatgtncctgcgccgcatcctatcagccggtaccgnccacgctctgttggcccgcgtcaaggagacgacggggatcgtcggcctcgacgtngtgccgaatgcccgcgaggtgcttatctcgctctacaccaagacgctcanggagatccaggccgtgccggagggagagtcgtaccggaaggccgtcgagtatttcacccgccaccggctccaggtctgcaaggaggagggggactgggngatgatcgagaagcggatcgcccgcggccaggtggaggagttgatncaggaggcgcaggatgagctcaagctcattgggaagatgatcgagtgggatcc

SEQ ID NO: 2410 - DNA, 320 bp, Lilium asiatic
  modified_base (6)..(6): a, c, g, t, unknown, or other
  modified_base (61)..(61): a, c, g, t, unknown, or other
  modified_base (91)..(91): a, c, g, t, unknown, or other
  modified_base (297)..(297): a, c, g, t, unknown, or other
cgactnttttcggtcgccggagcccctcaaatgtgatcaaacctccttcatattacacccntagaatcacattgatctcctgatcatttcncctttgttaatttctaaatctactatgggcattatgagttctcagcaccttcgttcgccgaccattctctggagatctccggtcacctcgtctccgactgattcactaccccgggagctaatcacatgtaagcttcatccatttgaagattatctacatcactcatgttttatttcaggggagtgccggttaggaccgccacctcnctaggggcactagcaaggagcag

SEQ ID NO: 2411 - DNA, 373 bp, Lilium asiatic
  modified_base (11)..(11): a, c, g, t, unknown, or other
  modified_base (128)..(128): a, c, g, t, unknown, or other
  modified_base (156)..(156): a, c, g, t, unknown, or other
  modified_base (233)..(233): a, c, g, t, unknown, or other
  modified_base (259)..(259): a, c, g, t, unknown, or other
  modified_base (284)..(284): a, c, g, t, unknown, or other
  modified_base (311)..(311): a, c, g, t, unknown, or other
  modified_base (359)..(359): a, c, g, t, unknown, or other
cggtgacgggnaaggtgttcgaccgcatcaaggaagactccggcaaggtcgccctctccttcgagggcgtctacatcgccgtcctttgcgtgtacaatcatatcaacaagcacctgccggggcgtcanaacgatccgccgacgaaggagagccttntagccatgatgcaggaatatgatgtttacctggatgggctgctcgaccgggaagagcccccccccctcatcaggaanttgacagccgatacagtagctgccgncagtcttaatctgttgaccgcctcncgccgcgcgcctccagccccggcaatnggcggcaaaaaaggcgactgaggggcggcctggtgtgggcaaagtgtngcagaaagtaccca

SEQ ID NO: 2412 - DNA, 349 bp, Lilium asiatic
  modified_base (6)..(6): a, c, g, t, unknown, or other
  modified_base (60)..(60): a, c, g, t, unknown, or other
  modified_base (91)..(91): a, c, g, t, unknown, or other
  modified_base (120)..(120): a, c, g, t, unknown, or other
  modified_base (148)..(148): a, c, g, t, unknown, or other
  modified_base (198)..(198): a, c, g, t, unknown, or other
  modified_base (223)..(223): a, c, g, t, unknown, or other
  modified_base (297)..(297): a, c, g, t, unknown, or other
gctggnagagacctcacagatgccttgatgaagatcctgaccgagaggggctactcattnacaaccacagcggagcgggaaatcgtgcgtnacatcaaggagaagcttgcctacgtggcncttgattatgagcaggagctcgaggccnccaagagcagctcatcagtcgagaagagctacgagatgcctgacggtcanatcataaccatcggggctgagcgtntcaggtgccccgaggttctctaccagccctccctgataggcatggaagctgctggcattcatgagaccacctanaattcaattatgaaatgcgatgttgatatcacgaaggatctgtatgggaaca

SEQ ID NO: 2413 - DNA, 434 bp, Lilium asiatic
cgggaagtcgagggtgatgtaatgctcggctttatggggcagggcttgggcctacgacctggagttatagatggagccatcagcatctcggcagttcagtggttgtgctatgctgataagtcctctcacgaaccaagattgagattgaaagctttctttggatcactatatagatgcttagcaaggggtgcaagagctgtgttgcaactttatgccgagaatatggaccagagcgagatgatcatgacttgtgctatgcgatctggatttgcaggtggtgttgttgttgactggccacacagttcaagagcaaggaaggcctatcttgttctcacatgtggtccaccttccatacatacatcccttccaaaaggcaaaggtgaaaatggggagatgtgcagtgacgaagaaagtggtgatgatgaaaatgaaac

SEQ ID NO: 2414 - DNA, 248 bp, Lilium asiatic
  modified_base (217)..(217): a, c, g, t, unknown, or other
ggggggggggggcagggagaggaagaggggggaagggagagagaaggggggaagagagggggggaaagagaaggagggggggggaggaaaaagggagagggggggggaggggaagaggagaggggggagggggggggggggaaggaggggcgggcggcacgccgggcgggggggggggggggggggggggggggagaggggggggggggataggaanagggggggggggggggggggggggggggggg

SEQ ID NO: 2415 - DNA, 376 bp, Lilium asiatic
  modified_base (5)..(5): a, c, g, t, unknown, or other
  modified_base (60)..(60): a, c, g, t, unknown, or other
  modified_base (230)..(230): a, c, g, t, unknown, or other
  modified_base (305)..(305): a, c, g, t, unknown, or other
  modified_base (330)..(330): a, c, g, t, unknown, or other
gctgntggagacctcacagatgccttgatgaagatcctgaccgagaggggctactcattnacgaccacagcggagcgggaaatcgtgcgtcacatcaaggagaagcttgcctacgtggcgacttgagttatgtagcatggagcctcgaggccgcgcaagagcagcttatcagtccccccccccccaccccacccccccggtcaactcataaccatcggggctgagcgttntaagtgccccgaggttctctaccaagcccttcctgataggcatggaagctgctggcatttatgagaccgcggacncttccctccccccccgccccccccncccccccccccccccctccccccccccccccccccccccccccccc

SEQ ID NO: 2416 - DNA, 433 bp, Lilium asiatic
  modified_base (54)..(54): a, c, g, t, unknown, or other
  modified_base (85)..(85): a, c, g, t, unknown, or other
  modified_base (114)..(114): a, c, g, t, unknown, or other
  modified_base (142)..(142): a, c, g, t, unknown, or other
  modified_base (169)..(169): a, c, g, t, unknown, or other
  modified_base (193)..(193): a, c, g, t, unknown, or other
  modified_base (269)..(269): a, c, g, t, unknown, or other
  modified_base (317)..(317): a, c, g, t, unknown, or other
ttgtccgggaactcccagtcagtggtatctaaatgtgattctagaaattgttcngtttgtggttttttgtggataaatgaattgncttcgagtcgagcttgtggtctgtaaaantgaagcagaggtctttatgttggataantatagtgcgtcaacgttatagtagagntcggagagcaacacccgcgccccncctctccgcgccccccccccttccgcttaaactagaaagatatatatgttccgcactgtcaagactataagttgantttctagatcacccacgtatttgtggagccctattaaaaaagctgggntgcaaccttgttgggtgccccacatggtgtttcgccgccgcccccgcccccacccccccccctccccccccccccccccccccccccccccccccccgcccccccccccccccccc

SEQ ID NO: 2417 - DNA, 457 bp, Lilium asiatic
ccacgcgtccgcggacgcgtgggcggacgcgtgggcggaggaaagagaaggccagaatagctgcaatttatgagaaggatgttgaagaaaaaatgcgtcaatatataatcgaaaggatggggataaatactcgatacagtgacctagatatgggaggtctagaaagacggagttttagacaagaaaagcaatctgaaacggagcatgaagttgagggaatgaaccttaaagaatttatgacgagtggaaatggtaaaggtagctctggtcagcccattaagaaaaagccaaaagtatctgtgcctgattccgataagccgaaaagaaagccgaaaagaaagctcacaagaaaggcacgacggaagagaaatgaaactgtgtgagatcgcaaagaagccttaccttcctgttccatctttcagcagttgtaggatcaagtgttcaggatgcacggctt

SEQ ID NO: 2418 - DNA, 445 bp, Lilium asiatic
  modified_base (5)..(5): a, c, g, t, unknown, or other
  modified_base (90)..(90): a, c, g, t, unknown, or other
  modified_base (119)..(119): a, c, g, t, unknown, or other
  modified_base (147)..(147): a, c, g, t, unknown, or other
  modified_base (173)..(173): a, c, g, t, unknown, or other
  modified_base (223)..(223): a, c, g, t, unknown, or other
  modified_base (249)..(249): a, c, g, t, unknown, or other
  modified_base (273)..(273): a, c, g, t, unknown, or other
  modified_base (321)..(321): a, c, g, t, unknown, or other
ggggntctggggggagggagcggaatatgttggcactgaccatgaggacgagttccgatgggactggttcggtgatgcggccggagccgnactggatctcgtgagggaagcatttggtnggagattcccagcacaggtgaaatttangatagacaaggattgccttcctattnctgaacgtgtttttaagattgccacagaagaaaattatgaagcccgtggnagatttaaacctgacctgaattccanacaggtgcacaggttacatgcttngtttcaacccctccctttggaggaggaacaaagggcccctgttgttantaatgctttacctgaacaaaggcttcctcattatgctttgcctgagaaaaggcctccaattcgtattgcttgccctgagcaaaggcttcttattaatattgcgtacccggaccagaggcccctt

SEQ ID NO: 2419 - DNA, 439 bp, Lilium asiatic
ggcagccgaagcgactgtcgcgaggcaaggccatcgtccgccatgacgctctccctctccacctctttcctccccatccccgccgccgcgaggaccaccgcccgcaccctacgctccgtcgtcccctcccaggggatgcgctgctcgatgcgcaagaaggggttgcacccggagatctacgaggacgcgaaggtgtactgcaacggcgagctggtgctggtgacggggggcaccaagccggagtacacggtggacgtgtggtccggaaaccacccctactacgtcggcgacacctcggcgctcgtggtcatggacagccagatcgagaagttccgcaagaagtggggccacatcaaggagtactggcccgaggaccagtggagggagatgcacccagacggcgacccggagttcgagcccgagggggacacctgattga

SEQ ID NO: 2420 - DNA, 183 bp, Lilium asiatic
  modified_base (91)..(91): a, c, g, t, unknown, or other
cccccccccccccccccccgccccccccccccccccccccccccccccccccccccccccccccccccgcccccccccacccccccccccncccccccccccccccccccccgcccaataaatattattattattcgccccccccccccccccccccccccgccccccccccccccccccccc

SEQ ID NO: 2421 - DNA, 311 bp, Lilium asiatic
  modified_base (91)..(91): a, c, g, t, unknown, or other
  modified_base (148)..(148): a, c, g, t, unknown, or other
  modified_base (175)..(175): a, c, g, t, unknown, or other
  modified_base (199)..(199): a, c, g, t, unknown, or other
gtgacatttgggcctactggtctgaccactgaagttaagtctgttgagatgcaccatgagcgctctccttgaagccctccctggtgacaancggggatttaatgtgaagaatgttgctggtaaggatcttaagcgtgggtttgttgcntcaaactccaaggatgaccctgccaangaggcggccaacttcacttcccangttatcatcatgaaccaccctggcgagattggtaatggttatgctcctgtgctggattgccatacctctcacattgctgtcaagtttgctgagatcctgaccaagatcgaca

SEQ ID NO: 2422 - DNA, 309 bp, Lilium asiatic
  modified_base (47)..(47): a, c, g, t, unknown, or other
  modified_base (137)..(137): a, c, g, t, unknown, or other
  modified_base (164)..(164): a, c, g, t, unknown, or other
  modified_base (188)..(188): a, c, g, t, unknown, or other
  modified_base (213)..(213): a, c, g, t, unknown, or other
  modified_base (264)..(264): a, c, g, t, unknown, or other
ctgttacacaatccgaagctgaacctcaaagaaacttttggcacaanatgcgttgccccagatgcccggacagtatcgagtcaagcataatatctccagaaactttagctaatcaggtgaaaaggcaagctgagaantacatctccttgtattacaaatgcctnatgatgtgtgacccccacccttgnaagtatactacccggaatctgaatnttcgagtgataggtgattctgaaagacgaactatctgtcccaactatcccngctgcaatggacaccttataaggcagtacactgaggcagatttat

SEQ ID NO: 2423 - DNA, 407 bp, Lilium asiatic
  modified_base (47)..(47): a, c, g, t, unknown, or other
  modified_base (78)..(78): a, c, g, t, unknown, or other
  modified_base (108)..(108): a, c, g, t, unknown, or other
  modified_base (163)..(163): a, c, g, t, unknown, or other
  modified_base (187)..(187): a, c, g, t, unknown, or other
  modified_base (238)..(238): a, c, g, t, unknown, or other
  modified_base (286)..(286): a, c, g, t, unknown, or other
  modified_base (311)..(311): a, c, g, t, unknown, or other
  modified_base (357)..(357): a, c, g, t, unknown, or other
gccatgatggagctagttatatataggccgggcatcaactccaattnatgggggagaaaaggagatggcgtgcgaagnaggcggtccgctcccatcgccattaaggtncactggactatagcggaggagaggtcaccttgccattaaagcattatggactggnatggtgctagcgtgccgacaagangtatggcgggttgcccgcccaacgtcgccccccgccgccgccaccgtgaancagttatatgttctgcatgtctgtgctctgcattggagggataaacancctgaggtgatagtgaattggtcantcggtattcgctaccgcccccgcgaaaccttagtaaaaagaggggnttaactagtacaaagccttgtagcttcatatcctttccatcatactcgag

SEQ ID NO: 2424 - DNA, 316 bp, Lilium asiatic
gttcgcggacgcgtgggctttggtcaccaaacaatggcagataaaacctcagattgcgtctgttggctcttgttgtctggttggagtaatctctggcgaaactttgtatgttgctaatgttggggactcccgtgctgtattgggaagactagttaaggcgaccggagaggttctggctgttcagttgtcagcagagcacaatgcaagcatagagtctgtgaggcaagaattgcattcattacacccggatgatccttagattgttgttctgaagcataatgtttggcgagtaaagggacttcattcagattttcta

SEQ ID NO: 2425 - DNA, 435 bp, Lilium asiatic
gctacggatcgtgtcggcggtggggctgagcagggagtgccggcacaagctggagcggctcatggggctcatgctggaccaggccacgctcgacgacctcctcgtctccggcgacgacggcggcggcgtgtacgacgtcaacctggtcatgaggctggtcagggtgttcgtggcctcccaagaggaggcagacgcgccgtcggagaggatgcggaaggtggggcgcctggtcgacaagtacctcggcgaaatctcgccggaccaggggctgaaggtgtccaagttcctcgccgtcgccgagagcctgccggactcggccagggactgctacgacggcgtgtaccgggcgctggacatctacctcgagtcgcacccaacactgtccctggaggagcgcacgacgctgtgccggtgcctcaactacgaaaagctgac

SEQ ID NO: 2426 - DNA, 257 bp, Lilium asiatic
  modified_base (5)..(5): a, c, g, t, unknown, or other
  modified_base (60)..(60): a, c, g, t, unknown, or other
  modified_base (91)..(91): a, c, g, t, unknown, or other
  modified_base (120)..(120): a, c, g, t, unknown, or other
  modified_base (199)..(199): a, c, g, t, unknown, or other
agcgnttccaaggtacgatgcaaggagcaatttatgctattcgatccaatggaaatggtntaaaacatgctgtgctacagcatcttcgagncgtaagtccagttgcacggcccacagttnttcgacgttttgagtctgcttcgcctggtcgtttggaagagcatggatttgaaagcatcacagtttcagacattctganagctaaaggcaaaggtgctgatgggtcctggctgtggtgcactacagatggctctgtt

SEQ ID NO: 2427 - DNA, 331 bp, Lilium asiatic
  modified_base (46)..(46): a, c, g, t, unknown, or other
  modified_base (108)..(108): a, c, g, t, unknown, or other
  modified_base (187)..(187): a, c, g, t, unknown, or other
  modified_base (311)..(311): a, c, g, t, unknown, or other
cggacgcgtgggcggactcgtgggcggacgcgtgggcggacgcgtncgggttttttttttctggttttttgggacgagccaacaatatccttacaaaagcattatttnataaacccagaactaccataaactcagcctacttcaaatcaaaacttaggtcataacaaaaaggggggggaaaacaganaacatgacactgctaataaaacaggttgaacaacttcaagatgagaggacgcatgccacgagagcctaagaggtggtatcccggccctcccccccgatgagacccttatacttgacctggaacnacttcatggcattatccctt

SEQ ID NO: 2428 - DNA, 327 bp, Lilium asiatic
  modified_base (46)..(46): a, c, g, t, unknown, or other
  modified_base (78)..(78): a, c, g, t, unknown, or other
  modified_base (288)..(288): a, c, g, t, unknown, or other
cggacgcgtggggatttttcggttgaaagagatggggctcaccttnaccaagctgttcaggcggttgttcgcgaaganagagatgcggattctgatggtcggtctcgatgcggctggtaagacgaccatcctgtacaagctgaagctgggcgagatcgtcaccacgatccctaccatcggattcaacgtggagactgtcgagtacaagaaccttagctttactgcccgcccccccccgcccccccctcccccccaccccttccgcggaggcactacttccagaacacncagggactgatattcgtcgttgacccccccccccccccc

SEQ ID NO: 2429 - DNA, 386 bp, Lilium asiatic
  modified_base (85)..(85): a, c, g, t, unknown, or other
  modified_base (115)..(115): a, c, g, t, unknown, or other
  modified_base (170)..(170): a, c, g, t, unknown, or other
  modified_base (194)..(194): a, c, g, t, unknown, or other
  modified_base (219)..(219): a, c, g, t, unknown, or other
  modified_base (246)..(246): a, c, g, t, unknown, or other
  modified_base (294)..(294): a, c, g, t, unknown, or other
  modified_base (341)..(341): a, c, g, t, unknown, or other
gcgtccgcggacgcgtgggcgactgcttcgaatatgaagcaagcagcaatgcaaatacaacacaaagtcgaccgttcaactgttnctcagtgttaaaggtaccgaaacacttgtnaaaatcacaatatttccaagaagagtggactctctcaactgttgagctgctttcngcacattttgctcagtggagctancatgtctcattccctgaactcgcanctatacctctcattctcttgaaaaggntccattccaagtccaccgtcgaggacttgcgccgtcctgtgaagaagntaatacatcaggtcgagaagtatttcgaattcattgagaagaaaagngacgatgttgcctttccaccgggcgaccatgcatcggttgattca

SEQ ID NO: 2430 - DNA, 220 bp, Lilium asiatic
gccgcgaccaatggaactgggccagcaagatcccttatggctatggatcacctgactctatcaagcagaatggtcaccaaacaaacggatccgctgactcctccaagcagaatggccaccgcacaaacggttcaactgactcacccaagcggaacgggcaccatgcgtatgggtctgctgactcacccaagcgcaacgggcactgcgtttttggatcatc

SEQ ID NO: 2431 - DNA, 347 bp, Lilium asiatic
  modified_base (78)..(78): a, c, g, t, unknown, or other
  modified_base (135)..(135): a, c, g, t, unknown, or other
  modified_base (162)..(162): a, c, g, t, unknown, or other
  modified_base (186)..(186): a, c, g, t, unknown, or other
  modified_base (212)..(212): a, c, g, t, unknown, or other
  modified_base (286)..(286): a, c, g, t, unknown, or other
  modified_base (310)..(310): a, c, g, t, unknown, or other
  modified_base (333)..(333): a, c, g, t, unknown, or other
ctggggttatcgacccggccaaggtgacaaggtgtgcactgcagaaagctgcatcggtgggggggatgattttgacgncacaggctattgtggttgagaagcctgcgccgaaggctcctgcacctgctgagcctnaagggctgaccatataagcgaggttcntgcccgctctctctcccccccccnccccccgccgcccccccccccccccnccgggtaggtttggtagaactcgccacccccccccctccccccccccccgcccctccccccgcccccccccccncccccccccccccccccccccccncccccgccccccccccccccccncccccccccccccc

SEQ ID NO: 2432 - DNA, 426 bp, Lilium asiatic
cggacgcgtgggtttggaggtgcggtttcgtgggagggggatggttctccatttcaagaggcagatgaggacatcacacatcagtttgttgataggccaacacaaggtcatatgtttctttctagagaatatatccagcctcaatggatttatgactgtattaatgctcggataatattaccaacagaggcttatttggttggaaggattccaccaccgcatctgtcaccttttgtagacaatgaggctgaaggccatgttcctgagtatgcagagaccatcaaacgcctccaagctgcagctaaaagccaagtgtcaccaatgccaggtttagatggtcagcattttgatgatgcgcagtctctttttaatgaagcgagttattgatcgatctgaaactaaagaagctgcagaaaaagaaacaag

SEQ ID NO: 2433 - DNA, 227 bp, Lilium asiatic
  modified_base (7)..(7): a, c, g, t, unknown, or other
  modified_base (61)..(61): a, c, g, t, unknown, or other
  modified_base (122)..(122): a, c, g, t, unknown, or other
  modified_base (150)..(150): a, c, g, t, unknown, or other
  modified_base (177)..(177): a, c, g, t, unknown, or other
  modified_base (202)..(202): a, c, g, t, unknown, or other
aaatttntgagaaagaagtcgttgtcaccatgcagtcatttgccgtgaaagtgcggaaccnctcgggaacaaagcaatgccgagcaacgaccaatgatgatggaaagtggggacatggagangtggctgaagacgagggagaaagagaancaaattattcagaaggaactagatgcnttgaacaagaagctcgtcctatttnccaggccagagtggcagcactgatg

SEQ ID NO: 2434 - DNA, 396 bp, Lilium asiatic
  modified_base (112)..(112): a, c, g, t, unknown, or other
  modified_base (239)..(239): a, c, g, t, unknown, or other
gggaaaaaggagaaggagaagaaaaaagagaggagagggaaagtggagagagggagaggagggggaagacgagggagaaagagagagaaagaaggaaaaggaagggaaaggngggaggggggggggggggggggggaggggggggggggggggggggggggagggggggggggggggggggggggggaggtagggaaggggagggggggagggaggggggggggggggggggggggggngggggggggggggggggggggggggggcgggggggggggggggggggggggcggggggggggggggggggggggggggaggtaattaggatgggaaaagggaggggggcgggggaggaggagggggaagaagtaatggggggggggggggggggcgg

SEQ ID NO: 2435 - DNA, 331 bp, Lilium asiatic
  modified_base (48)..(48): a, c, g, t, unknown, or other
  modified_base (109)..(109): a, c, g, t, unknown, or other
  modified_base (138)..(138): a, c, g, t, unknown, or other
  modified_base (165)..(165): a, c, g, t, unknown, or other
  modified_base (189)..(189): a, c, g, t, unknown, or other
  modified_base (215)..(215): a, c, g, t, unknown, or other
gggccgatcccatgctggaagaggcacttattcatatggataaccgcnagtcagcagaggagactgtgcagacaacaagaaaggagccagaactgataggatgtgaagnacacaccgttatagaaaaatctgatgatntacaattacagagagcagtgctacaantacagaacacaatgctggaggcanacgatattctagataagaggacagancaagagatggagatgtcgtccctgtgttcaagtaatgagttctatacaacgagctcagaagacaagtcaccattctgtactggcgaagctgctatattgcccataaatgatcagat

SEQ ID NO: 2436 - DNA, 137 bp, Lilium asiatic
  modified_base (83)..(83): a, c, g, t, unknown, or other
ttcggtagaagaaggtatttatgacaaagatagcagttcttcatttttttaatgttgaaatggtcaaggagtgcaatacattnttgaaggagtggtctggatcgagccagttagcaatctataagtttgttgaagac

SEQ ID NO: 2437 - DNA, 166 bp, Lilium asiatic
  modified_base (51)..(51): a, c, g, t, unknown, or other
  modified_base (86)..(86): a, c, g, t, unknown, or other
  modified_base (144)..(144): a, c, g, t, unknown, or other
ccggggatgcgtggtgggactcaaggggggacgcgttggggagtgatttgnatggagagaggcaatgttatacttgagatgccatngatatggtagtagaggatcttccgttacttcggtgagaaaaggggtggagctttgttnacaattgggataagaaactgag

SEQ ID NO: 2438 - DNA, 329 bp, Lilium asiatic
ctctttatgaccttgagtttgtacagttccaccctacaggcatatatggtgctgggtgtcgcattactgaagggtctcgtggtgaaggaggtatcctcaggaatagtgaaggtgagcgttttatggaacggtatgctcctactgccaaggatcttgcatcacgtgatgttgtgtctagatcgatgactatggaaatcagagaaggtcgtggtgtagggccactgaaggatcacatttatctgcatctgaatcacttacccccaaaggtttctcaaggaaaggcttccttggcatatccgaaactgctgcaatctttgtcggtgttgatg

SEQ ID NO: 2439 - DNA, 298 bp, Lilium asiatic
ccgaccgcacgcgtccgcggacgcttgtattaatactccatccattttctccctcattgttgatctaacctaataaagagccattcagcgaatcaacggtcatatctaccaattcaaaaaggcctacatcctctttttcaacgactgcgatcgttgcatcacaaccaatgatctcttaaccgtgatgccatcacttattcagaattcaaccgaaaccgaatggcaatacattattaattaagctcatgctgaattcaatggttccatcgactttcccgaacttcttaaccttatattc

SEQ ID NO: 2440 - DNA, 434 bp, Lilium asiatic
cgatgaaccatcaacagcagcagcaggatatgggaaacctgcttttaagtgggcttgggtcggcgaacagcttcaataatcttcagtttgattggaaaccgtccccttaactacgtgtgtcggcacacctacttcatattactcaatacagtttcctgtgcaatagtgacagagctacatttatctctcatatagtgtagcttcttggatactttgaattcctcgacttgtatggaagtcagcttgcctgttgagcttcatagaaagtttgctgaatctcatgtaacagttatgtaataggtgaaagagatggagatggatcagcagtcttgtgcttcttgtacgattttcctagtcggatgtagagatcatctctgcaaaagcgctggtatcgtcacccatctctgtaacatgtaaaccaacattctgacgtg

SEQ ID NO: 2441 - DNA, 372 bp, Lilium asiatic
cgatgaaccatcaacagcagcagcaggatatgggaaactttcttttaagtgggcttgggggggcgaacagcttcaataatcttcagtttgattggaaaccgtccccttaactacgtgtgtcggcacacctacttcatattactcaatacagtttcctgtgcaatagtgacagagctacatttatctctcatatagcgtagcttcttggatactttgaattcctcgacttgtatggaagtcagcttgcctgttgagcttcataaaaagtttgctgaatctcatgtaacagttatgttatatgtgaaagagatggagatggatcaccagtcttgtgcttcttgtacgattttcctattctgatgtataagatca

SEQ ID NO: 2442 - DNA, 356 bp, Lilium asiatic
  modified_base (37)..(37): a, c, g, t, unknown, or other
  modified_base (96)..(96): a, c, g, t, unknown, or other
atggctcgttcagaaacctcactagggaggatgtgancattctgaaggagggagatgcagcgtctattgtacctcctagatctctgttggatgctnccgtctaatgaatcgagtgaagatcgtcggtttggttcgagtcaggtctgtttgagcagtgtagtcggagtcaattgatatggttttaataattatgtggatgtaatttagaatccacaatcgacttttatgcagtgggttttttttcttttgtgtgcttaggaatcagcttatccagaggttcgcagcttatcctgccaaatcattggatgtaatttagaatccaaaatttgtaagaatgatttggaggttttttttat

SEQ ID NO: 2443 - DNA, 378 bp, Lilium asiatic
  modified_base (10)..(10): a, c, g, t, unknown, or other
  modified_base (44)..(44): a, c, g, t, unknown, or other
ctcgatggtntcgtcaacgactttatctccatcttacacacatnggacctcacgtctgggatctgatgcatatcggttgcacctcctagaggttgcctaagtacccgaaggcggaggcggaggaatctagccggtcgtagttccttgccggggaggagacgcacatgcacccgactccacaacccaaaacttgtggcatcaacaaggagtactagagcaactctcatgctcgatgaaaaattgtttccatagcgactagcattttcttactttcttcccgtacacacctctttatcagctgtaatataattattttaccccaaaaaatctattgaggaaaaaatgatgaagaatagatagatgtttcggtcacattca

SEQ ID NO: 2444 - DNA, 142 bp, Lilium asiatic
  modified_base (69)..(69): a, c, g, t, unknown, or other
  modified_base (98)..(98): a, c, g, t, unknown, or other
  modified_base (125)..(125): a, c, g, t, unknown, or other
cggtcgcgtgggcggcggagaagaagcctgctggaaagaaacccaaaggccgggaaaaggtccccggcntcaaaggaggggccttttgccaggaaaanaaaaaggtcgaaaaattcgttgaaaanctacaaaatttactttt

SEQ ID NO: 2445 - DNA, 88 bp, Lilium asiatic
  modified_base (12)..(12): a, c, g, t, unknown, or other
  modified_base (76)..(76): a, c, g, t, unknown, or other
ctcgatggtgtngtcaacgactttatctccatcaacaaacatcggacctcaggtctagtatctcatgcatatcggntgcacctcctag

SEQ ID NO: 2446 - DNA, 403 bp, Lilium asiatic
  modified_base (38)..(38): a, c, g, t, unknown, or other
  modified_base (97)..(97): a, c, g, t, unknown, or other
ctgacgcgtgggcgtgtggatatagaagtctgctgagnagaagccgaaggccgggaagagggtcccggactccaaggagggggcctctgacaagaanaagaagaggtcgaagaagtcggtggagacctacaagatctacatcttcaaggtgttgagtcaggtccaccctgacatcgggatctccagcaaggcaatggggatcatgaacagcttcatcaatgatctctttgagaagatggctcatgagtccgcccgccttgctcgctacaacaagaagaacaccatcacctctcgggagattcagactttcgtacgactcgtcctccccggcgagctcgccaagcatgccgtttctgaaggcaccaagcggtcaccaagtcaccagcgcttatggtctttactg

SEQ ID NO: 2447 - DNA, 349 bp, Lilium asiatic
  modified_base (12)..(12): a, c, g, t, unknown, or other
  modified_base (103)..(103): a, c, g, t, unknown, or other
ctcgatggtgtnctcaacgactttatcttcatcaacaaacatcggacctcacgtctagggtctcatgcatatcggttgcacctcctagaggttgcctaagtanccgaaggcggaggcggaggaatcaagccggtcgtagttccttgtcggggaggagaggcacatggatctgactccacaacccaaaacttgtggcatcaacaaggagtactagagcaactctcatgctcgatgaaaaattgttttcatagcgactagcattttcttacttttttcccgtacacacctctttatcagctggaatataattaatttacccccaaaaaatctattgaggaaaaaaaggatg

SEQ ID NO: 2448 - DNA, 307 bp, Lilium asiatic
gcagaaatggcggtcgctacaagcacgggtttggccacgtcaagttcatccgttgttccaactgcggcaagtgctgtcctaaggataaggcagtcaagaggttccaggtcaggaacattgtcgagcaggcagctgttcgtgatgtccaagaggcctgtgcctttgatggctacgtgctaccgaagctttatgcaaaacttcagtactgtatctcctgtgcaatccatgctcacattgtcagggtgagatctcgtactgacaggaggaaccgtgacccgcctcagcgtttcagacgtcgggaggactt

SEQ ID NO: 2449 - DNA, 228 bp, Lilium asiatic
  modified_base (4)..(4): a, c, g, t, unknown, or other
  modified_base (37)..(37): a, c, g, t, unknown, or other
  modified_base (68)..(68): a, c, g, t, unknown, or other
cggncgcgtgggcggcggataacaagtttgctgagantaacccgaaggccgggaagagggtcccggcntccaaggatggggcctctgacaagaagtagaataggtcgtagacatcggtggagaactacaagatctacatcttcaaggtgttgaaggatgtccaccctgacatcgggatctacagcaaggcaatggggatcatgaacagcttcatcaatgatctctttg

SEQ ID NO: 2450 - DNA, 389 bp, Lilium asiatic
  modified_base (10)..(10): a, c, g, t, unknown, or other
  modified_base (43)..(43): a, c, g, t, unknown, or other
  modified_base (159)..(159): a, c, g, t, unknown, or other
cccacgcgtncgccctcgcgtccgccttctcgttcgcaagcanctcgctaccaaggctgctcggaagtcggcgccgacgaccggcggagtgaaaaagccccatcgctacaggcccggcacggtggcgctccgtgagatccggaagtaccagaagagcanggagcttctcatcaggaagctgccgttccagaggctggtgagggagatcgcgcaggattttaagacggatctccgtttccagagccatgccgtgctagctctccaggaggcggcggaggcttatctggtgggattgttcgaggatacaaacctgtgcgctattcatgccaagcgcgtcacaatcatgccgaaggatatccagcttgcgcggcggattcgtggcgagcgtg

SEQ ID NO: 2451 - DNA, 413 bp, Lilium asiatic
  modified_base (12)..(12): a, c, g, t, unknown, or other
  modified_base (45)..(45): a, c, g, t, unknown, or other
  modified_base (75)..(75): a, c, g, t, unknown, or other
  modified_base (103)..(103): a, c, g, t, unknown, or other
  modified_base (130)..(130): a, c, g, t, unknown, or other
cccacgcgtctncccacgcgtccgcccacgcgtccgcaagcagcncgctaccaaggctgctcgcaagtcggcccngacgaccggcggagtgaaaaagccccancgctacaggcccggcacggtggcgctncgtgagatccggaagtaccagaagagcacggagcttctcatcaggaagctgccgttccagaggctggtgagggagatcgcgcaggattttaagacggatctccgtttccagagccatgccgtgctagctctccaggaggcggcggaggcttatctggtgggattgttcgaggatacaaacctgtgcgctattcatgccaagcgcgtcacaatcatgccgaaggatatccagctcgcgcggcggatccgtggcgagcgtgcctaaatgtgttacatctttcttt

SEQ ID NO: 2452 - DNA, 55 bp, Lilium asiatic
  modified_base (9)..(9): a, c, g, t, unknown, or other
  modified_base (45)..(45): a, c, g, t, unknown, or other
cccacgcgnttgcccacgcgtccgccctttcgtattcaagcagcncgctaccaag

SEQ ID NO: 2453 - DNA, 239 bp, Lilium asiatic
cggacgcgtgggctgcctcctaaagcaatgttttcgaaggttagggtgtttatgtatccaagcaacatttgaggatgcatggaacaattgaatctgggtgaagttcatttgtcgtctgtttttgatttctacttaatagacatttaaaagaactttgttacttgattttgtagtgactgtttggttggttgacatcttagcttgtcttgagtaatttatttagtaacttggtttggttt

SEQ ID NO: 2454 - DNA, 440 bp, Lilium asiatic
gtggaaatgataaactacagacgaggcttttaggggaagtttgaattaaagcattgctagggatggttagatgtggacaccctgatgttcttgctcaggtagcacgaggcattgctaattttgccaagtgtgagtcgagagcttctacacaaggaaagaaggcaggaaagtctctcttgattgaagatggcaccctcccttggattgtaaacaatgccaacaatgaggcttctccgattaggcgtcatattgagctcgccctttgccacttggcccaacatgaagtaaatgcaaaagatatgataagtgagggtgccttgtgggagctcgtgcgcatttctcgggattgttcccgagaagaaattatgacacttgcacaccgtacgcttattttcagtcctacttttcaagcagaactaataaagctgcacatagaatgc

SEQ ID NO: 2455 - DNA, 406 bp, Lilium asiatic
  modified_base (4)..(4): a, c, g, t, unknown, or other
  modified_base (37)..(37): a, c, g, t, unknown, or other
  modified_base (96)..(96): a, c, g, t, unknown, or other
  modified_base (123)..(123): a, c, g, t, unknown, or other
agcngtagaattaccgttgacacatcatgatttgtanaagcagatcggtattgatcccccgagaggtgtgcttctctatggtcctcccggcactgntaaaactatgcttgctaaggctgttgntcatcatacaacagctgcttttataagagttgttggctctgagtttgtgcagaagtatctcggcgagggcccgagaatggttagggatgtatttcgtcttgcgaaagagaatgccccggcaattatcttcattgatgaggttgatgccatagctacggcacgttttgatgcacaaactggtgctgacagagaagttcagcgtatcctaatggaactactgaatcagatggatggatttgatcagacagtaaatgtcaaagtaataatggcgaccaatcgagcg

SEQ ID NO: 2456 - DNA, 402 bp, Lilium asiatic
  modified_base (4)..(4): a, c, g, t, unknown, or other
  modified_base (37)..(37): a, c, g, t, unknown, or other
  modified_base (96)..(96): a, c, g, t, unknown, or other
  modified_base (123)..(123): a, c, g, t, unknown, or other
  modified_base (155)..(155): a, c, g, t, unknown, or other
caancctccatctctcttatcaatttgagtggatttncggtttaagtagagggagatgtggccgttcagcaagaagggggcttctgggttttcatngtactcaacggcagaggaagtcacacnagggcttgatggatccggcctcaccgccatcnttacgggggcatctagtgggattgcatctgaaacagctcgcgttcttgcattacgtggcattcatgttttcatggcagtcagaaatttgtctactggtgctaatgtcaaaaacacaatactcaaggaaattcccactgctaaaattgatgtcatggtgctggatctcacatcaatggcatcagtgagaaaatttgcattgtagttcaactctttgaatctttcattgaacatcctcattaacaatgc

SEQ ID NO: 2457 - DNA, 191 bp, Lilium asiatic
  modified_base (6)..(6): a, c, g, t, unknown, or other
  modified_base (47)..(48): a, c, g, t, unknown, or other
  modified_base (52)..(52): a, c, g, t, unknown, or other
  modified_base (54)..(55): a, c, g, t, unknown, or other
  modified_base (120)..(120): a, c, g, t, unknown, or other
cggggnacacacaaactggtttaacgcccatccatatgctgtcgagnnctcncnnaccgtcaggctgtctgtttcgatagtggttcgtctgaaatatgctcgatccgtagtggctggacnctgaccgactctgggaagcgcttcatacacaggtcttctcacgagctgttgcacggaggtcagcaactcga

SEQ ID NO: 2458 - DNA, 354 bp, Lilium asiatic
  modified_base (3)..(3): a, c, g, t, unknown, or other
  modified_base (37)..(37): a, c, g, t, unknown, or other
  modified_base (67)..(67): a, c, g, t, unknown, or other
  modified_base (95)..(95): a, c, g, t, unknown, or other
  modified_base (122)..(122): a, c, g, t, unknown, or other
canacctacatttctcttatttttttgtttggatacncggcttaagtagagggagatggggacgatnaacaagaatgctgcttctaggttttcancgtactcaacggaagaggaagtcacanaagggcttgatggatccggcctcaccgtcatcattacggcggcatctattgggattgcatctgaaacagctcgcgttcttgcattacgtggcattcatgttatcatgtcagtcaaaaatttgtctactgctgctaatgtcaacaacacaatactaaatgaaattcccactgttaaaattgatatcatggagctcgatctcacatcaatggtattaatgtgaaaatttgcatt

SEQ ID NO: 2459 - DNA, 76 bp, Lilium asiatic
  modified_base (6)..(6): a, c, g, t, unknown, or other
  modified_base (29)..(29): a, c, g, t, unknown, or other
aaaaanggctcgacgccacgcgtccgttntaaaattctaatttaactatttgaatataaaaccactaaacaatcca

SEQ ID NO: 2460 - DNA, 407 bp, Lilium asiatic
  modified_base (28)..(28): a, c, g, t, unknown, or other
  modified_base (62)..(62): a, c, g, t, unknown, or other
  modified_base (146)..(146): a, c, g, t, unknown, or other
  modified_base (177)..(177): a, c, g, t, unknown, or other
  modified_base (351)..(351): a, c, g, t, unknown, or other
aattcccgcagcagtccacgcgttcgtnttgatgattttaaacgttctatcgttatgacaanaattatggttcgtagtgactaaattcgggcgattatagattagctcatcattattagtgggattctgtgtatgtatcttgatantgttgatgtttatcttttacagtaactaggngttcatgttggtatattcttgagatgaattgacgattatgaatcagatttacattgctgaattattgtagtagtgattgtgtatcagattcacattattgaattattgtagtaacttgattcttgaatccaatttgggttcattatagattaaagtataattttttgaggaatntgcgtgtgcaatgttcttgcttttttctctttcattgtatgtggtgggacatgtgt

SEQ ID NO: 2461 - DNA, 393 bp, Lilium asiatic
  modified_base (11)..(11): a, c, g, t, unknown, or other
  modified_base (44)..(44): a, c, g, t, unknown, or other
gaagaagaggncgaagaagtcggtggagacctactagaatctanatcttcaaggtgttgaagcaggtccaccccgacatcggtatctccagcaaggccatggggatcatgaacagcttcatcaacgacctcttcgagaagatggctcaggagtctgcttgtctcgcccgctacaacaagaagaataccatcacctcccgcgagatccagacctctgttcgccttgtcctccctggggagctcgccaagcacgccgtgtctgagggcaccaaggcggtcaccaagttcaccagcggctagggtctcacaccctcttcttgtggtgttctaatgtgtagtgatttgtctttcatggggatgtgaatcatatattttctcaatatatgcccctttt

SEQ ID NO: 2462 - DNA, 403 bp, Lilium asiatic
  modified_base (9)..(9): a, c, g, t, unknown, or other
  modified_base (42)..(42): a, c, g, t, unknown, or other
  modified_base (127)..(127): a, c, g, t, unknown, or other
gaagaagantcgaataagtcggtggttacctactacgatctncatcttcaaggtgttgaagcaggtccacctcgacatcggtatctccagcaaggccatgtggatcatgaacagcttcatcaacganctcttcgagaagatggctcaggagtctgctcctctcgcccgctacaacaagaagaataccatcacctcccgcgagatccagacctctgttcgccttgtcctccctggggagctcgccaagcacgccgtgtctgagggcaccaaggctgtcaccaagttcaccagcggctagggtctcacaccctcttcttgtggtgttctaatgtgtaatgatttgactttcatggggacgagaatcatatattttctcaatatatgccccatttttatttaaaaa

SEQ ID NO: 2463 - DNA, 107 bp, Lilium asiatic
  modified_base (10)..(10): a, c, g, t, unknown, or other
  modified_base (43)..(43): a, c, g, t, unknown, or other
  modified_base (72)..(72): a, c, g, t, unknown, or other
  modified_base (100)..(100): a, c, g, t, unknown, or other
gtttttggtnctaaaaaactacattaatgtaggatgacttcangatgcacaaagataatgcttttgccaacntggagtcatcctacattaatgtagtttntggttct

SEQ ID NO: 2464 - DNA, 250 bp, Lilium asiatic
cccacgcgtccggcatttttatacatgttctattggggcggaaggcacgggtgcctccgggagccttttgcttatctgcagataaaggcagatatggagccatctgctgagaaacttcgagtgagagctaatctcgcctttcccagagaacgactggaatgcgatggttgtggtggtgaagggtgaagtgatggtgaaatacaagcgtcgacagatatcactcgatgaatgattgcaacgcatggtacac

SEQ ID NO: 2465 - DNA, 397 bp, Lilium asiatic
  modified_base (2)..(2): a, c, g, t, unknown, or other
  modified_base (34)..(34): a, c, g, t, unknown, or other
  modified_base (92)..(92): a, c, g, t, unknown, or other
  modified_base (119)..(119): a, c, g, t, unknown, or other
gntattgtagacaaagatatgagccatcctcagntgcctaagagaatcgaggatgcacatattgctatcctcacttgtccttttgagccacngaagccaaagacaaagcataaggttgncattgacaccgtagagaagtttcagactctgcggctgcaagagcagaagtactttgacgacatggttcagaaatgcaaggatgttggtgctactctagttatttgccaatggggttttgacgatgaagctaatcatttgttgatgcatcgcaacttgcctgcagttagatgggttggtggtgtggaattggagttgattgcaatagctacaggtgggagaattgttccaaggttccaagagttgacacctgaaaaattatggaaggctggtttagtga

SEQ ID NO: 2466 - DNA, 275 bp, Lilium asiatic
  modified_base (67)..(67): a, c, g, t, unknown, or other
  modified_base (95)..(95): a, c, g, t, unknown, or other
  modified_base (122)..(122): a, c, g, t, unknown, or other
atgagctctttcaaaaacctttttatgtatgatgcgaagaacctgaaggagggagacgcaacgtttntagtacctcctagatctctgttggatgntaccgtctaatgaatcaagtgaagatngagggcccggatcgagtcaggtctggttgagcagcataatcgccgtcaattgatataatattaataattatgtggatgtaatatagaatccacaatcgactgttatgcagaggcgtttaaatcttttgcgtgctaaggaatcagtttattcaa

SEQ ID NO: 2467 - DNA, 392 bp, Lilium asiatic
  modified_base (2)..(2): a, c, g, t, unknown, or other
  modified_base (36)..(36): a, c, g, t, unknown, or other
  modified_base (66)..(66): a, c, g, t, unknown, or other
gncgattcatgctggtcttttctaataatcggagtngacagataacaatcaggacaagcagttccnagcatccccagttagcacttgtgggtactattccacttgctatagctttatacaagcgcatatggcctggtgattcgaagcccttttagcgacttctggcatcaggttttctgcgagtcttttgatattgcgcatagtttcatcttgttattttctgttatatcttgtctgtttttcagctttgtactcctgcagttactgccattaccgtgaaatattaaattctagtagaaaatcaagaatcaagctcctgaagctgcgatatttaaactattgttgcatatgtaagttgtcaatacctttttcaaaagaaaaaacggaaagct

SEQ ID NO: 2468 - DNA, 242 bp, Lilium asiatic
  modified_base (10)..(10): a, c, g, t, unknown, or other
  modified_base (44)..(44): a, c, g, t, unknown, or other
  modified_base (73)..(73): a, c, g, t, unknown, or other
aaatatgggntcaaaagcagaaatagcttctacccttgtggagngcactaatgggaatgcaacatccgtcganagaattgaaagggaaacctcttttgcggagcttggatcttggaatgctttgctcgaggcccaaatttgatgctatttgtgccatgggccagttgcgccttttctctgatcaacaccgtggatttcaaattcacgagatgctctgccctgtttattgctattggagcggg

SEQ ID NO: 2469 - DNA, 387 bp, Lilium asiatic
  modified_base (42)..(42): a, c, g, t, unknown, or other
  modified_base (72)..(72): a, c, g, t, unknown, or other
  modified_base (126)..(126): a, c, g, t, unknown, or other
  modified_base (157)..(157): a, c, g, t, unknown, or other
atccctcccttcttttcaactacaatcttcaatggcgcccanggctgataagaaaccggtggcggagaagangccggccgaggaggagaagaagtcggtccctgcagagaagaagcctgcggagangaagcccaaggcagggaagaaggtcccggcntccaaggagggggcctctgacaagaagaagaagaggtcgaagaagtcagtggagacctacaagatctacatcttcaaggtgctgaagcaggtccacccggacatcggaatctccagcaaggccatggggatcatgaacagcttcatcaatgacctcttcgagaagatggcgcaggagtccgcccgtcttgcccgctacaacaagaagaataccatcacctcccgggagat

SEQ ID NO: 2470 - DNA, 401 bp, Lilium asiatic
  modified_base (10)..(10): a, c, g, t, unknown, or other
  modified_base (43)..(43): a, c, g, t, unknown, or other
atccctcccntcttttcaactacaattttcaatggcgcccaangctgataagaaaccggcggcggagaagaaaccggccgaggaggaaacgaagtcggtgcctgcagagaagaagcctgcggagaagaagcccaaggcagggaacaaggtcccggcctgcaaggagggggcctctgacaagaagaagacgaggtcgaagaagtcagtggagacctacaagatctacatctgcaaggggctgaagcaagtccacccgtacatcggaatctccagcaaggccatggggatcatgaacagcttcatcaatgacctcttcgagaagatggcgcatgagttcgcccgtcttgcccgctacaacaagaagaataccatcacctcccgggagattcagacctacgttc

SEQ ID NO: 2471 - DNA, 319 bp, Lilium asiatic
  modified_base (18)..(18): a, c, g, t, unknown, or other
  modified_base (49)..(49): a, c, g, t, unknown, or other
  modified_base (130)..(130): a, c, g, t, unknown, or other
cacgcgtccgatcctccncttttttaactactattttcaagtttcccangctgctaagaacgggcggcggggaacatccagtcgaagaggagaccaagtctgtccctgctgattataagcctgcggagantaagcccaaggcagggaacaatgtcccggcttgcacggagggggcctttgacaagaagaagaagaggtctaagaagtcagtggagacctacatgatctacatctttaaggtgctcaagcaggaccacccgtacattggaattttcaacaaggccattgtgatcatgaacagctttatcaatgaccctct

SEQ ID NO: 2472 - DNA, 422 bp, Lilium asiatic
cccacgcgtccgcccacgcgtccgcccactcttccgcggacgcgtgggctttggtagagatggaggtcggtaatggcgccgccggctctgctgtgaagaggatcttggcctccatggttatcagatctgttgtggccgacttcgctgtagtcaccacggagatggttctcttgttgattggctctttgtcaagttttggttgtgtttcaggagatgtgaatgatttgattaaagggacccgggtaattgtccccaggcaaactaaaagtgaaactgtgcctgagaatatggatggtagcgattcagaagatgatgattcggatgatgatgaagaagaagacggggatgacgaagcagatggggatgatgaagacttttccggagacgaaggggatgatggagaaagtgaggatgatgaacct

SEQ ID NO: 2473 - DNA, 390 bp, Lilium asiatic
  modified_base (3)..(3): a, c, g, t, unknown, or other
ctnagaatggaaagtgtgatatttttgctggagagtgcattcataatccgatgggtccagcttacagcaatgcgacttgccctttcattgaatctcctcaggattgtatcaagaatggccgacctgacacgggctatcttcactggaggtggaaaccacatgattgggatgtagctctatttgacgcgcaaaaatttctgaattccatgccgaacaaatcttgggcactgattggtgattcaattttccgcaatcatgtccagtcattactttgtcttctttctaaggcagaagtacctgttgaggtttaccaccatgaaacatttaagaacagaagattgcgttttcactcccacaatttcactctctgtgtcttgtggtctccttttc

SEQ ID NO: 2474 - DNA, 429 bp, Lilium asiatic
ctgaattgagcggggattacgtttttgaatcagctatggcagcggatcagaagacgatctaccaattcgaggaggtggcgacgcacaacctcaccaaggattgctggctcatcatctccggaaaggtgtacgatgtcacaccttttatggaggaccatcctggtggtgacgaggtcttgctcgcagcaacaggaaaagatgcaacaaatgactttgaagatgtgggtcacagcacatcagcaagggagatgatggacaaatacttcataggagaggtagacgcctccacagtcccgaaaaagcgggcctacattgcgccgcaacagacttcctataaccctacaaataaaacttcagacattaccatcaaaattctgcagttcctcgttcccattttgattctcggactggcgctgaccgtccgtcatt

SEQ ID NO: 2475 - DNA, 144 bp, Lilium asiatic
gtttatttgcctcttctatgatgtttttcatgtattagttgagttctatacactcaactaaactgatatactgtcttgtaaatatttggataaatgttggattttattcttctggagaatagaagatgagtatttgatttcatg

SEQ ID NO: 2476 - DNA, 397 bp, Lilium asiatic
  modified_base (2)..(2): a, c, g, t, unknown, or other
  modified_base (65)..(65): a, c, g, t, unknown, or other
  modified_base (93)..(93): a, c, g, t, unknown, or other
  modified_base (151)..(151): a, c, g, t, unknown, or other
  modified_base (354)..(354): a, c, g, t, unknown, or other
cncacgcgtccgcccacgcgtccgccgctatctcgcacgtcgctccccaaatcatccgatcctanacccgcggccgtggcaccgaatccagangcgtctagaagggggaggtggtcgcccatgaccgtctgaccggccgtcgccatgggangcgctggatccactccaaagactgacgataatggtaagaatttgaagaaaccaaagccttggaagcacacccaagcaataacgccggcacaactcagacagatgcgtgatgaattttgggacactgctcctcactatggtggacagaaagagatttgggacgcacttagagccgctgcagactctgacctagcgcttgcgcanaccatagtggatagtgctggcatcatcgtatcgaattctgaca

SEQ ID NO: 2477 - DNA, 431 bp, Lilium asiatic
  modified_base (39)..(39): a, c, g, t, unknown, or other
  modified_base (79)..(79): a, c, g, t, unknown, or other
tcggaattacccgggctcgacgccacgccgtcgcggttnttctcgtctacgatttactcatatacgttttaaaagacgncgaagcgtcactctgggggagaacgttgttacatgctatcgttctgggaagtctagcagaaccaagctgaatcagtgtaagcaggtacgttattttgcgtctcaatctaaaaggaagaagtcagaagctttgtcgagatattgagatagcaaacaacatttctcgacctcctgttgtcgtattcgtgagttcgagattgggagctgatcttctgtctgaagcgatcaccgctgcaactggattgaatgctgcttcaattcatggggagaacgagatggctgtacggaaggagagcctgaggcagtttttgacaggggagatctctgtgattgtctcaactggtattttgggc

SEQ ID NO: 2478 - DNA, 361 bp, Lilium asiatic
  modified_base (10)..(10): a, c, g, t, unknown, or other
  modified_base (43)..(43): a, c, g, t, unknown, or other
  modified_base (101)..(101): a, c, g, t, unknown, or other
  modified_base (128)..(128): a, c, g, t, unknown, or other
  modified_base (160)..(160): a, c, g, t, unknown, or other
  modified_base (263)..(263): a, c, g, t, unknown, or other
gcaggagttnaaccatgtcggagatgccagccccacctttacngcctcggacctcggggccaaacgagatgggcctgaatctggatggcgaacggtgccancacatgatcctgtggtccaagatgcancaaatcatgctgtgaagaccatccagcagagntctaactctctggctgcctatgaactgcttgacatacttcatgcaaaggcagaggtgattgaagaccatgcaaagtttgatttgcttctcaaggtgaaacggngaagcaaagaagagaagtttaaggtggaagtgcacaagaatctggagggtacttttcatttgaatcagattgagcaagaccattcttgagtgactttc

SEQ ID NO: 2479 - DNA, 308 bp, Lilium asiatic
  modified_base (51)..(51): a, c, g, t, unknown, or other
  modified_base (108)..(108): a, c, g, t, unknown, or other
  modified_base (134)..(134): a, c, g, t, unknown, or other
cgcgtccggctgaattataaccatgtctgatatgctttcccttcctttacncccacgaacctcgggggcaaaggagatggtcctgaatctgtattgcgaacgcttccncctcatgatcctgtagtccaagatgnaaccaatcatgctgttaagaccaaccagcagaggtctaactctctggctgcctatgaactgcttgacatacttcatgcataggctgaggttattgaacaccatccagagttttcattagcttctcattgggaagctgtgtagcatataaaataagattatggttttacttcaca

SEQ ID NO: 2480 - DNA, 261 bp, Lilium asiatic
  modified_base (53)..(53): a, c, g, t, unknown, or other
acgcgtccggcaggaatttaaccatttcggagatgctttcccttcctttaccncctcggacctcgtggccaaacgagatgggcctgaatctggattgctaacggtgccagcacatgatcctgtggtccaagatgcagcaaatcatgctgtgaagaccatccagcataggtctaactctctggctgcctatgaactgcttgacatacttcatgcataggcagaggtgattgaagaccattccaagtttgatttgcttctcaa

SEQ ID NO: 2481 - DNA, 329 bp, Lilium asiatic
  modified_base (37)..(37): a, c, g, t, unknown, or other
  modified_base (39)..(39): a, c, g, t, unknown, or other
gacgcctgggctttctcgtgggtctcttttcctgagnangtcattatagggcacctcagtgaaaaagtgggggtattcggatgtggtgtagtcgccttggagattctttctggaaggtctaattcagatgcaagtcttgatgaagaaaaggcttttcttcttgaatgggcctggcatttacacgagaacagacgcagtttggagattgtcgatccgaaactaccttcgttcaacaaggaaaaggccactcgccttatcggggttgctcttctctgcattcagtcatcacccatgctccgaccggccatgtcacgggtggtagccatttt

SEQ ID NO: 2482 - DNA, 357 bp, Lilium asiatic
  modified_base (352)..(352): a, c, g, t, unknown, or other
cttcaagggcaacaagtgcatggtggaggatgtgatggacgtgattgagctcgtcatcgaggcggcgctcttggccggaagggttcttcaccggccttagatggatgattggattcttcaccggccttttacgtgttcgtagtctgtactggttggatatttgatgtaatctcataattgtactaaaacgaatatttcgaaacctttaggaataaggtcctaacaggacgccgctcaatctcagtgctgcgtcgacaaatcgtgtggaaatttgataacccgtgttattgttttaatccagtatgagattcaagcatttggactgttttttcaaaaaaaaaaaaaaaaccanataat

SEQ ID NO: 2483 - DNA, 413 bp, Lilium asiatic
gaagtcccaagcattcatcgcattcacttgaaaaccgcaaaaataacaattctgttaacccaataaaaataaaacaaattgatgtgaactaatggtaggaattgatgctcgttcatagagggcttttggagctgtagagacaggaaaatcgaagtcggagctcttatcagaaacttccaccctctcatttggcttgatgaccaattcactgcaagagtgaccctgataggcatacaccatgttatccgtttgagatgaactaatggtaggaattggtgctccatcatagaaggcttttggggctgtagagacaagaaaattaaagcagaagcccttatcaaaaactttcaccctcttatttggcttgatgaccgattcactgcaagagtaaccctagtaggtatgcgtcctgc

SEQ ID NO: 2484 - DNA, 239 bp, Lilium asiatic
ttgagtattacaaccgataacaataattgacagagtattactttcctaaaaaaactataaattatatttcgtttataaagcttcttaaagattgtcaagatcttaccatttgttgcttatattactttttaaatttgagtggagatatgcttcattcactgactttttgtttctttatatgataaacttaagccaaaagttttactacggaattgaaaggttctggattctgcatataa

SEQ ID NO: 2485 - DNA, 396 bp, Lilium asiatic
  modified_base (11)..(11): a, c, g, t, unknown, or other
  modified_base (44)..(44): a, c, g, t, unknown, or other
  modified_base (101)..(101): a, c, g, t, unknown, or other
  modified_base (159)..(159): a, c, g, t, unknown, or other
gttaaatcatnagcaagcatggttatatgagcttcctagtaaanttatgaaactagatggtaaacacccttctctttcaaaggtaattttaaaacttgttnttcaaatcggacaatcatctcggccaaacactctgtttgatttggagtatgacaaccngcaacagccattgacagagttttactttcccaaaaaaactatagattctggtccgtttatgaagctccccaaggattgccaagagcttgccatttgttgcttatattacttctcaaatttgagtggagatatgcttcagtcactgacttcttgttgcttatatgataacttggagccagatgtattactacggattgtagaggttctggattctgcatataaagctggatatgtgca

SEQ ID NO: 2486 - DNA, 371 bp, Lilium asiatic
  modified_base (12)..(12): a, c, g, t, unknown, or other
  modified_base (102)..(102): a, c, g, t, unknown, or other
gttaaatcatcntcaagcatggttatattagctttctagtaaacctatgaaactagagggttaagacccttcttgttcaaaggtaattttaaaacttgttcntcaaatcggacaatcatcttggccaaccactctgtttgatttggagtatgacaaccctcaacagccattgacagagttttacttttccaaaaaaactatagattctggtccgtttatgaagctccccaaggattgccaaaagcttgccatttgttgcttatattacttctcaaatttgagtggagatatgcttcaatcactgactttttgttgctttatatgataaccttggagccagaagtatttactaccgtattgtagaggttctt

SEQ ID NO: 2487 - DNA, 400 bp, Lilium asiatic
cactttctccctgaccacccgaccagctccgcctctttcttaactgctccgcccctgcctgcaagactcccagcaagcgcccaaccatcgcgccagtggtccctccacactggaccacctcccagagaagaagagcagcatgcatgcaatccgagccgtcaactccgagatcaacgctgccgagcttccttactctatctctccttgttttctttttggattaaatctggagcttacaaatataactctccgtgcaggaatggtggagattgcttacacgcgcgagccagagctatcaagggaggagttgatcatgcatgcacgaaagcggagatggaaggctctgatgatgtgaaggtacgaggagcagaggatcaagcagaggagatgcacatgcaga

SEQ ID NO: 2488 - DNA, 430 bp, Lilium asiatic
ctccgctcgccggagattcaaacccgacgaccccttctttttcgccggaaacgtcgagcgagagctcctcgccaaacaggttgcacttgatcttactgaagacgaaagacatcagtttcagaaaattatccatgctgacattaacactgtgttctgccctattgttggttgtggcgctcagttgaattgtttggaagactttgaggatcactatcatgctcgacacactgcatcttgttctacatgctttagagtctacccaacatctcgattactgagtatacatgtttctgaagcgcatgattctttctttcaggcgaaagttgcacgtggttttccaatgtatgaatgcctggtagaaggctgtggagtgaagttcaagagctacaaagggcgaaagcaacacctaatcgataaacatagattcccc

SEQ ID NO: 2489 - DNA, 211 bp, Lilium asiatic
tacgcttgcctgttattcaaaccccttgttccctggttttatttccgaaacgacgagcgagagctcctggccgaacatggtgcactcgatcttactgaatacaaaagacatcagtttcacaaaattatccatgctgccattaacactgcgttctgccctattgttggttgtggcgctcaaataaatctggctgtaatacttataagatcac

SEQ ID NO: 2490 - DNA, 395 bp, Lilium asiatic
  modified_base (12)..(12): a, c, g, t, unknown, or other
  modified_base (102)..(102): a, c, g, t, unknown, or other
gttaaatcatcnacaagcatggttatattagcttcctagtaaacttatgaaactagagggtaaacacccttctgtttcaaaggtcattttaaaacttgttcntcaaatcggacaatcatctcggccaagcactctgtttgatttggagtatgacaacctgcaacagccattgacagatttttactttcccaaaaaaactatacattctgttacgtatatgcagctccccaaggattgccaagagcttgccatttgttgcttatattacttctcaaatttgagtggagatatgcttcagtcactgacttcttgttgcttatatgataacttggagccagatgtatcactacggattgtagagggtcttactttctgcatataaagctggatatgtg

SEQ ID NO: 2491 - DNA, 231 bp, Lilium asiatic
  modified_base (40)..(40): a, c, g, t, unknown, or other
  modified_base (50)..(50): a, c, g, t, unknown, or other
aggagtcacatctgatggagcagctcgcgctctcgatagnagaagctgcnctgaaattcatgacgagctctataaggttaatcaggaagccagtgacaaagtgttggtggttgaacaaaagtataatgagatacggagacctgtctacaggaagcggaatgagatcatccaatctattccagacttttggctaaccacatttttgagtcatcctgcacttgctgatctatt

SEQ ID NO: 2492 - DNA, 364 bp, Lilium asiatic
  modified_base (13)..(13): a, c, g, t, unknown, or other
  modified_base (75)..(75): a, c, g, t, unknown, or other
gttgacgatgagnacataatcattggatcagccaacatcaaccagaggtcattggatggagccagagactccganatcgccaggggagcataccagacgaactatctatccaaccatcaaccggccaggcgacagattcacggcttcagattgtctctctggtacgagcatgtcgggaagctagatgactccttcctccaccccgagagtgtggagtgcattcataagatcaataatatttcggagcagcacttggacttgaactcgagtgatactctagagcatgatcttccgggacatctactcagctacccgatcggagtcactagcgatggtttgatcagcgagttgccagggttagagt

SEQ ID NO: 2493 - DNA, 288 bp, Lilium asiatic
  modified_base (5)..(5): a, c, g, t, unknown, or other
  modified_base (38)..(38): a, c, g, t, unknown, or other
  modified_base (69)..(69): a, c, g, t, unknown, or other
atctnacttcagaaatgtacacagatacaaatatcatntggccacagacctcgtcaagcaaggctcacntgcgctaggcatcagcgctgcatcgatccaaacatacattgctggtgtatcatgtccatacatcagccgatggccttcagataatgtagcgctgttggtcggctattgctcacttagatgcgcgcgcactcttgttaaggtaaagacatgctgaatcatatgaacctcttgaacataaacctgatgcgagaaggtgtactacaagatcagcatgtgact

SEQ ID NO: 2494 - DNA, 283 bp, Lilium asiatic
cacttgatcttactcaaaacgaaagacatcagtttcaaaaaattatccatgctgacattaacactgtgttctgccctattgttggttgtggcgctcagttgaattgcttgtaatactttcaggatcactatcatgctcgacacactgcatctcgttctacatgctttaaaatctacccaacatttctattactgagtatacatgtttctgaagcgcatgaatctttctttatagctaatagttcaccgtgcttttccaatgtattaatgcctggtagaaagct

SEQ ID NO: 2495 - DNA, 254 bp, Lilium asiatic
  modified_base (198)..(198): a, c, g, t, unknown, or other
ccttcatcagctccgtttgccttcatcttcctcatgttctcccctctccatgtctcacatggagagcttcttgttggtttctactccaattcgtgccctaatgccgaggctatagtgagatccactattaaagaagctgcttcatcagatccaaagattctggcaggattgcttaggatccattaccatgactgcatngttcaaagttgtgaacgatcggtactcattcaaaacccagtgaatgaaaaacatga

SEQ ID NO: 2496 - DNA, 281 bp, Lilium asiatic
caataaatgcatgcacacattgacttaatgttctgggtgctttccgatttgtgtctacatcgtctgattttctttgattttcccttttgctttcttgtacatgttcatgatacttctttgtagattctcgcttaagtccaagccatgcattactcaccgcaagtttcattcttcatgctaagtcccgaacttatctgaaaccaagaaaattcgcgtaataagcacaatttatatgtaagtttacctaagttaacaacattaaacatgcattatatcacaaa

SEQ ID NO: 2497 - DNA, 199 bp, Lilium asiatic
  modified_base (9)..(9): a, c, g, t, unknown, or other
  modified_base (13)..(13): a, c, g, t, unknown, or other
  modified_base (17)..(17): a, c, g, t, unknown, or other
  modified_base (30)..(30): a, c, g, t, unknown, or other
  modified_base (42)..(42): a, c, g, t, unknown, or other
  modified_base (47)..(47): a, c, g, t, unknown, or other
  modified_base (49)..(50): a, c, g, t, unknown, or other
  modified_base (63)..(63): a, c, g, t, unknown, or other
  modified_base (67)..(68): a, c, g, t, unknown, or other
  modified_base (70)..(71): a, c, g, t, unknown, or other
  modified_base (79)..(79): a, c, g, t, unknown, or other
  modified_base (82)..(83): a, c, g, t, unknown, or other
  modified_base (87)..(88): a, c, g, t, unknown, or other
  modified_base (93)..(93): a, c, g, t, unknown, or other
  modified_base (100)..(100): a, c, g, t, unknown, or other
  modified_base (103)..(103): a, c, g, t, unknown, or other
  modified_base (106)..(106): a, c, g, t, unknown, or other
  modified_base (115)..(115): a, c, g, t, unknown, or other
  modified_base (128)..(128): a, c, g, t, unknown, or other
  modified_base (143)..(143): a, c, g, t, unknown, or other
  modified_base (166)..(167): a, c, g, t, unknown, or other
  modified_base (171)..(171): a, c, g, t, unknown, or other
  modified_base (174)..(175): a, c, g, t, unknown, or other
  modified_base (184)..(184): a, c, g, t, unknown, or other
  modified_base (186)..(187): a, c, g, t, unknown, or other
gaacgacanagcnccancgaaagcacaagngcaagaaaagcnccgcnannagaacaagaaacngagnncnnggggaggnaanngccnngagangacaggnganaangaaacccanacacaaagaacangaacgaggcaaacancgagcgaacgacgccggagaaanncgangcnngaacccgcnanngggaaaggggaa

SEQ ID NO: 2498 - DNA, 205 bp, Lilium asiatic
  modified_base (7)..(7): a, c, g, t, unknown, or other
  modified_base (14)..(14): a, c, g, t, unknown, or other
  modified_base (16)..(16): a, c, g, t, unknown, or other
  modified_base (29)..(29): a, c, g, t, unknown, or other
  modified_base (31)..(31): a, c, g, t, unknown, or other
  modified_base (33)..(33): a, c, g, t, unknown, or other
  modified_base (48)..(49): a, c, g, t, unknown, or other
  modified_base (52)..(52): a, c, g, t, unknown, or other
  modified_base (69)..(69): a, c, g, t, unknown, or other
  modified_base (73)..(73): a, c, g, t, unknown, or other
  modified_base (75)..(75): a, c, g, t, unknown, or other
  modified_base (85)..(85): a, c, g, t, unknown, or other
  modified_base (105)..(105): a, c, g, t, unknown, or other
  modified_base (112)..(112): a, c, g, t, unknown, or other
  modified_base (125)..(125): a, c, g, t, unknown, or other
  modified_base (129)..(129): a, c, g, t, unknown, or other
  modified_base (132)..(132): a, c, g, t, unknown, or other
  modified_base (135)..(135): a, c, g, t, unknown, or other
  modified_base (139)..(139): a, c, g, t, unknown, or other
  modified_base (142)..(142): a, c, g, t, unknown, or other
  modified_base (145)..(145): a, c, g, t, unknown, or other
  modified_base (151)..(152): a, c, g, t, unknown, or other
  modified_base (183)..(183): a, c, g, t, unknown, or other
ggcgagngggaagnangagaagaaggggnangngcggccgaagcaccnngangagaagggggcggcccngcancncaacaagccnggagcgaaaccgacaaagcncaccccngagcaggccgacnacancanggngccngcngcngggccnnacaagcccccgcacgacagggaccaggcggnggaagagaacaaaccaggacag

SEQ ID NO: 2499 - DNA, 419 bp, Lilium asiatic
ctggaaaacccggcccgacccacgcgtccgcaattaattcatccacacattgacttaatgtactttgagctctccgatcagtgtatacatgttctgattttcaaagattttaacatgtgctcactggatcataatcaacatactactttgtaaatactcgcctaagttcaagccacgcattactcacctcaagtttcaatctacatgctaagtcccgcacttaaacgaaaccaacaaaattcacgtaataagcacaatttatatgtaagttttcctaagttaacaacattaaacatgcattatatcacaaatatcaatggccgatcagaacccatacatagagcctttcgaatatgcacccgcattgcttcctgttgtgtgtgcacaagtccataggtacgcacatttctttttttttt

SEQ ID NO: 2500 - DNA, 434 bp, Lilium asiatic
caagataaacaaaattatttcgacagccaagagcgaaggtgcaactattttatgtggtggtggacgccccaagcatctagagaagggattctatattgaaccaacaatcataacgaacgtgagcacctccatgcaaatctggagggaggaggtttttggtccggttctctgtgtcaagacatttgcaacagaagatgaagctatcgaacttgcaaatgatactcattatggtctaggtggtgccgtgatctccaaggatccagagagatgcgagcgtttgacagaggtacatcaaaactgccagataacttctgcagcaacagaaatactattttctcattaacatttcgtgatgttgtgtaaaagggaaatacaataactgcaaccttgttttgcaggccattcaagctgggattatatgggtgaactgttcg

SEQ ID NO: 2501 - DNA, 180 bp, Lilium asiatic
  modified_base (2)..(2): a, c, g, t, unknown, or other
  modified_base (7)..(7): a, c, g, t, unknown, or other
  modified_base (10)..(10): a, c, g, t, unknown, or other
  modified_base (12)..(14): a, c, g, t, unknown, or other
  modified_base (18)..(21): a, c, g, t, unknown, or other
  modified_base (23)..(23): a, c, g, t, unknown, or other
  modified_base (36)..(36): a, c, g, t, unknown, or other
  modified_base (39)..(39): a, c, g, t, unknown, or other
  modified_base (41)..(41): a, c, g, t, unknown, or other
  modified_base (48)..(48): a, c, g, t, unknown, or other
  modified_base (50)..(51): a, c, g, t, unknown, or other
  modified_base (53)..(53): a, c, g, t, unknown, or other
  modified_base (55)..(55): a, c, g, t, unknown, or other
  modified_base (73)..(74): a, c, g, t, unknown, or other
  modified_base (79)..(80): a, c, g, t, unknown, or other
  modified_base (91)..(92): a, c, g, t, unknown, or other
  modified_base (94)..(94): a, c, g, t, unknown, or other
  modified_base (108)..(108): a, c, g, t, unknown, or other
  modified_base (118)..(118): a, c, g, t, unknown, or other
  modified_base (124)..(124): a, c, g, t, unknown, or other
  modified_base (126)..(127): a, c, g, t, unknown, or other
  modified_base (129)..(130): a, c, g, t, unknown, or other
  modified_base (134)..(134): a, c, g, t, unknown, or other
  modified_base (140)..(140): a, c, g, t, unknown, or other
  modified_base (142)..(142): a, c, g, t, unknown, or other
  modified_base (145)..(147): a, c, g, t, unknown, or other
  modified_base (152)..(152): a, c, g, t, unknown, or other
  modified_base (159)..(161): a, c, g, t, unknown, or other
gnggaanganannnaccnnnnanaaggcacaagggnacncngacggancnncncngggggaggaagacaagcnngagcnngcgaccgcacnnanggagaaggcaaagnccaagggggnacaacncnngnngccnaccgangnggnnngagcnaacaagnnngcaaaagacgcagagagca

SEQ ID NO: 2502 - DNA, 80 bp, Lilium asiatic
  modified_base (4)..(4): a, c, g, t, unknown, or other
  modified_base (18)..(19): a, c, g, t, unknown, or other
  modified_base (21)..(21): a, c, g, t, unknown, or other
  modified_base (23)..(24): a, c, g, t, unknown, or other
  modified_base (30)..(30): a, c, g, t, unknown, or other
  modified_base (45)..(45): a, c, g, t, unknown, or other
  modified_base (49)..(49): a, c, g, t, unknown, or other
  modified_base (57)..(57): a, c, g, t, unknown, or other
  modified_base (69)..(69): a, c, g, t, unknown, or other
  modified_base (73)..(73): a, c, g, t, unknown, or other
agcnggaggggggggagnngngnnccggcnggaggcgccggacgngaangaagcggnggcgcacgcggnggangcggggg

SEQ ID NO: 2503 - DNA, 445 bp, Lilium asiatic
  modified_base (414)..(414): a, c, g, t, unknown, or other
cggacgcgtgggcgccgaaataatgaggtgcggggagatggtgttcaacacgctgcttgcgtcggggtttctcatggagggcaagacattccctttgccggtgtatctctcactccttccaatcatcggaggttgtgtgcttgcagttgttacagagaaaaacttcaacatgacaggttttgttgctgctactgttgcaagctttgcattcgcgtctatgaatgttcttttagcgagagggataaggaagtacacggagaagaagggaaagggggtcagaggacccgattatcctgcctacctctcgctactgtcctttctgattctcgcaccatttgcatttgcaatggagggtccccgtttatgggtggaaggtttcaagaatatagcaccacgtttcaccacatctgactntattacgattctcatagggataggattgatg

SEQ ID NO: 2504 - DNA, 170 bp, Lilium asiatic
  modified_base (32)..(32): a, c, g, t, unknown, or other
  modified_base (37)..(37): a, c, g, t, unknown, or other
  modified_base (39)..(39): a, c, g, t, unknown, or other
  modified_base (47)..(47): a, c, g, t, unknown, or other
  modified_base (50)..(50): a, c, g, t, unknown, or other
  modified_base (57)..(58): a, c, g, t, unknown, or other
  modified_base (67)..(68): a, c, g, t, unknown, or other
cccaaacaaaaaaaacaaagcggcgggggacngcacnangcaggccngangaaaccnngaacacggnncaagaaacggggcaagggaggggaaacaaaagaagaagaaggaaggcgcagaacaagcaaagcacaacagggagcgcggcggaaaggaaagccgccagcgaa

SEQ ID NO: 2505 - DNA, 293 bp, Lilium asiatic
  modified_base (9)..(9): a, c, g, t, unknown, or other
  modified_base (25)..(25): a, c, g, t, unknown, or other
  modified_base (33)..(33): a, c, g, t, unknown, or other
  modified_base (40)..(40): a, c, g, t, unknown, or other
  modified_base (42)..(42): a, c, g, t, unknown, or other
  modified_base (45)..(45): a, c, g, t, unknown, or other
  modified_base (51)..(51): a, c, g, t, unknown, or other
  modified_base (59)..(59): a, c, g, t, unknown, or other
  modified_base (70)..(70): a, c, g, t, unknown, or other
  modified_base (81)..(81): a, c, g, t, unknown, or other
  modified_base (86)..(87): a, c, g, t, unknown, or other
  modified_base (90)..(91): a, c, g, t, unknown, or other
  modified_base (94)..(94): a, c, g, t, unknown, or other
  modified_base (103)..(103): a, c, g, t, unknown, or other
  modified_base (106)..(106): a, c, g, t, unknown, or other
  modified_base (108)..(108): a, c, g, t, unknown, or other
  modified_base (113)..(113): a, c, g, t, unknown, or other
  modified_base (129)..(129): a, c, g, t, unknown, or other
  modified_base (150)..(150): a, c, g, t, unknown, or other
  modified_base (152)..(152): a, c, g, t, unknown, or other
  modified_base (166)..(166): a, c, g, t, unknown, or other
  modified_base (169)..(169): a, c, g, t, unknown, or other
  modified_base (174)..(175): a, c, g, t, unknown, or other
  modified_base (184)..(184): a, c, g, t, unknown, or other
  modified_base (193)..(193): a, c, g, t, unknown, or other
  modified_base (207)..(207): a, c, g, t, unknown, or other
  modified_base (210)..(212): a, c, g, t, unknown, or other
  modified_base (217)..(217): a, c, g, t, unknown, or other
  modified_base (224)..(224): a, c, g, t, unknown, or other
  modified_base (226)..(226): a, c, g, t, unknown, or other
  modified_base (233)..(235): a, c, g, t, unknown, or other
  modified_base (251)..(251): a, c, g, t, unknown, or other
  modified_base (255)..(256): a, c, g, t, unknown, or other
  modified_base (261)..(261): a, c, g, t, unknown, or other
  modified_base (263)..(263): a, c, g, t, unknown, or other
  modified_base (269)..(269): a, c, g, t, unknown, or other
  modified_base (273)..(273): a, c, g, t, unknown, or other
  modified_base (277)..(278): a, c, g, t, unknown, or other
cggacgcgnggggaagaacccgcgnaagaaccncaacacncngcngaggcngaagcccnaggcaaagacngcgaggagganggcgnngcnngcngaggcgcancgngngaagncgaagaaagaaaagcnggacaagaagaggacaccacncnccaaggaagaagcnganaaaannaaagcggcnggaaaagcnggggacaagacgangannncaganagcgacnanaccgaannngagaaccccacaaagnggcnnggagncncacagngagnagcnngcaacagcagagaga

SEQ ID NO: 2506 - DNA, 180 bp, Lilium asiatic
  modified_base (22)..(22): a, c, g, t, unknown, or other
  modified_base (24)..(24): a, c, g, t, unknown, or other
  modified_base (30)..(30): a, c, g, t, unknown, or other
  modified_base (33)..(33): a, c, g, t, unknown, or other
  modified_base (138)..(138): a, c, g, t, unknown, or other
  modified_base (156)..(156): a, c, g, t, unknown, or other
  modified_base (174)..(174): a, c, g, t, unknown, or other
gggcagcacacgggcaacacananaaaccncanaagaaaggggaggaaaacgaaacagcaggggcacaaaaaaaaagaggcaaagagaaagagcagagaaacagaaaccccagaaggcaacccgagcagaggaaccancacacgcaagagaaaaanagggaaggacagaacccngcaaga

SEQ ID NO: 2507 - DNA, 152 bp, Lilium asiatic
  modified_base (9)..(9): a, c, g, t, unknown, or other
  modified_base (21)..(21): a, c, g, t, unknown, or other
  modified_base (39)..(39): a, c, g, t, unknown, or other
  modified_base (41)..(41): a, c, g, t, unknown, or other
  modified_base (43)..(43): a, c, g, t, unknown, or other
  modified_base (88)..(88): a, c, g, t, unknown, or other
  modified_base (100)..(100): a, c, g, t, unknown, or other
  modified_base (109)..(109): a, c, g, t, unknown, or other
  modified_base (122)..(122): a, c, g, t, unknown, or other
  modified_base (124)..(124): a, c, g, t, unknown, or other
  modified_base (127)..(128): a, c, g, t, unknown, or other
  modified_base (131)..(131): a, c, g, t, unknown, or other
  modified_base (139)..(139): a, c, g, t, unknown, or other
  modified_base (143)..(143): a, c, g, t, unknown, or other
  modified_base (145)..(145): a, c, g, t, unknown, or other
cggacgcgngggcggacgcgngggggccagcagcgaagncncncagacccaaaggggacgggggcacaaaccgcggggccgcgcaacncggggggaaagngccagaaanggaaaggaaacangnganngcngccaccanagcngncaaaggg

SEQ ID NO: 2508 - DNA, 270 bp, Lilium asiatic
  modified_base (6)..(8): a, c, g, t, unknown, or other
  modified_base (12)..(12): a, c, g, t, unknown, or other
  modified_base (24)..(25): a, c, g, t, unknown, or other
  modified_base (33)..(33): a, c, g, t, unknown, or other
  modified_base (42)..(42): a, c, g, t, unknown, or other
  modified_base (50)..(51): a, c, g, t, unknown, or other
  modified_base (53)..(53): a, c, g, t, unknown, or other
  modified_base (66)..(66): a, c, g, t, unknown, or other
  modified_base (135)..(135): a, c, g, t, unknown, or other
  modified_base (142)..(142): a, c, g, t, unknown, or other
  modified_base (239)..(239): a, c, g, t, unknown, or other
gaaaannngggnggacccacgcgnncgcgcggnggcaccacngccaaacnngnggccaaaaaccgncccgcggacccgagagggacggggggggaaccggagcggaccaccagaacaaaagaaggggcggagagngaagagncaccagccagagcgagacggaacaacaggggacacaacccacagaaggcggagggcgccgacaaggcaacagaagcagagacgacggaagagaaccncgaggcggaacacaagacaggcaccgcaaag

SEQ ID NO: 2509 - DNA, 167 bp, Lilium asiatic
acgctaatacctattttttttctaagcttttttttttgatctcaaaacgacacccatgccagggggtattcccttgacgccgggaaacggcaaaatcacgaacaactttaacctctttccataaacacttgtcattcaacctcttttgtcgttcaaattaatggaac

SEQ ID NO: 2510 - DNA, 430 bp, Lilium asiatic
aagggagtcatgagtagcggtggcgatggtgattactttctgcgccagctgagctccaatggcacagccacggacagcgacaccaagggatcaaagagatggaggaaggccaagggggccgcggcctcagccagcagcggctgggaggttgagtacggcagcggcagcgagggctacagcggcaatgcgggtgcgaagaagcgggtgatggtggtcatcgaccagactgcggggacgaagcatgcgatgatgtgggcgctcacgcatgttgctaacaagggagatctgctaacactcctccatgtcgttgctccggcggagcaccaccggagggatgagactcccatgcttgctagctcgctggggacgctctgcaaggcctgcaaaccagaggtagaggtggaagcccttgtgatccaaggacccaagc

SEQ ID NO: 2511 - DNA, 438 bp, Lilium asiatic
ctcttaactctctcgcttgaatgtggttgttaagatctcaaaacttacttgatgcctttgcctatccccttgccaccttttatagccaaaatcccgagcagtttcaagcagtttcccttcagaattcgcaagcaaccaccctaaccgtgcaaactggcggaactgtgcgaaccgtcagggcaacttctctggaaaaaccatcatgtaaaatatacacacaattagaataaatgcgtgcgtatttaaacttcgcgattgtgtacgcaacagtatactatgcgtgcgcatttccatctttccctccatattcctgaaaatgaataaaaatagtatttagtgtagatttatggtgataattatgctaaacatgcttatatatggtatataaatagagccaatatcgggctcgatcacaccccacacttactcttttgcacg

SEQ ID NO: 2512 - DNA, 91 bp, Lilium asiatic
  modified_base (9)..(9): a, c, g, t, unknown, or other
  modified_base (13)..(24): a, c, g, t, unknown, or other
  modified_base (27)..(27): a, c, g, t, unknown, or other
  modified_base (29)..(29): a, c, g, t, unknown, or other
  modified_base (37)..(38): a, c, g, t, unknown, or other
  modified_base (47)..(48): a, c, g, t, unknown, or other
  modified_base (64)..(64): a, c, g, t, unknown, or other
  modified_base (72)..(72): a, c, g, t, unknown, or other
  modified_base (84)..(84): a, c, g, t, unknown, or other
  modified_base (86)..(86): a, c, g, t, unknown, or other
cggacgcgngggnnnnnnnnnnnnaananaacaagannagaagcgannactcaaccaacagaangaaacagnaaacggacaganancacaa

SEQ ID NO: 2513 - DNA, 241 bp, Lilium asiatic
attcccccagaccagcagcgactcatcttttctggcttgcagctcgaaaatggcaggactgttgcgtgctacaacattcagaaagagtcgactcttcatcaggtccttacgctgatgggtgggatgcaaatctttgtcaagaccctgactgggaagactattactctggaagttgatagctcggatacgattgataatgtgaatgctaagatacacgataaggaggggatttcttcttacc

SEQ ID NO: 2514 - DNA, 120 bp, Lilium asiatic
  modified_base (9)..(9): a, c, g, t, unknown, or other
  modified_base (20)..(20): a, c, g, t, unknown, or other
  modified_base (39)..(39): a, c, g, t, unknown, or other
  modified_base (83)..(83): a, c, g, t, unknown, or other
  modified_base (94)..(94): a, c, g, t, unknown, or other
  modified_base (98)..(98): a, c, g, t, unknown, or other
  modified_base (101)..(102): a, c, g, t, unknown, or other
  modified_base (113)..(113): a, c, g, t, unknown, or other
  modified_base (117)..(117): a, c, g, t, unknown, or other
cggacgcgnggggcggcgangaggcggcacggcagcggnagcggcagcggaggaggaggcggcggcggcggcagaggacaagnccggcgggaancgcngcnnacaagggcggngganggg

SEQ ID NO: 2515 - DNA, 251 bp, Lilium asiatic
  modified_base (4)..(4): a, c, g, t, unknown, or other
  modified_base (9)..(10): a, c, g, t, unknown, or other
  modified_base (20)..(20): a, c, g, t, unknown, or other
  modified_base (22)..(22): a, c, g, t, unknown, or other
  modified_base (28)..(30): a, c, g, t, unknown, or other
  modified_base (40)..(41): a, c, g, t, unknown, or other
  modified_base (43)..(43): a, c, g, t, unknown, or other
  modified_base (45)..(45): a, c, g, t, unknown, or other
  modified_base (52)..(52): a, c, g, t, unknown, or other
  modified_base (66)..(66): a, c, g, t, unknown, or other
  modified_base (69)..(69): a, c, g, t, unknown, or other
  modified_base (85)..(85): a, c, g, t, unknown, or other
  modified_base (93)..(93): a, c, g, t, unknown, or other
  modified_base (95)..(97): a, c, g, t, unknown, or other
  modified_base (100)..(101): a, c, g, t, unknown, or other
  modified_base (103)..(103): a, c, g, t, unknown, or other
  modified_base (109)..(109): a, c, g, t, unknown, or other
  modified_base (115)..(115): a, c, g, t, unknown, or other
  modified_base (121)..(122): a, c, g, t, unknown, or other
  modified_base (124)..(124): a, c, g, t, unknown, or other
  modified_base (130)..(130): a, c, g, t, unknown, or other
  modified_base (136)..(136): a, c, g, t, unknown, or other
  modified_base (142)..(142): a, c, g, t, unknown, or other
  modified_base (144)..(144): a, c, g, t, unknown, or other
  modified_base (146)..(147): a, c, g, t, unknown, or other
  modified_base (159)..(159): a, c, g, t, unknown, or other
  modified_base (162)..(162): a, c, g, t, unknown, or other
  modified_base (166)..(166): a, c, g, t, unknown, or other
  modified_base (171)..(171): a, c, g, t, unknown, or other
  modified_base (175)..(176): a, c, g, t, unknown, or other
  modified_base (187)..(187): a, c, g, t, unknown, or other
  modified_base (191)..(193): a, c, g, t, unknown, or other
  modified_base (200)..(200): a, c, g, t, unknown, or other
  modified_base (202)..(202): a, c, g, t, unknown, or other
  modified_base (204)..(207): a, c, g, t, unknown, or other
  modified_base (211)..(211): a, c, g, t, unknown, or other
  modified_base (214)..(214): a, c, g, t, unknown, or other
  modified_base (222)..(223): a, c, g, t, unknown, or other
  modified_base (247)..(248): a, c, g, t, unknown, or other
ggangccannagaaaggcangngcttcnnnagaagacggnnancnccccccnggggcagggggagnggngcaaaagagacagcanacccgacncnnnccnncnaaccanggagancggggnncnaccganaaaagnggaaanananngccaggaaccgnggncganacgangacnngccacccgacngagnnngaccccnancnnnngagncangccggcannacagggacgagcaggccaacacannacc

SEQ ID NO: 2516 - DNA, 124 bp, Lilium asiatic
  modified_base (2)..(2): a, c, g, t, unknown, or other
  modified_base (7)..(7): a, c, g, t, unknown, or other
  modified_base (11)..(11): a, c, g, t, unknown, or other
  modified_base (18)..(18): a, c, g, t, unknown, or other
  modified_base (22)..(23): a, c, g, t, unknown, or other
  modified_base (35)..(37): a, c, g, t, unknown, or other
  modified_base (39)..(39): a, c, g, t, unknown, or other
  modified_base (43)..(44): a, c, g, t, unknown, or other
  modified_base (49)..(50): a, c, g, t, unknown, or other
  modified_base (59)..(59): a, c, g, t, unknown, or other
  modified_base (77)..(77): a, c, g, t, unknown, or other
  modified_base (81)..(82): a, c, g, t, unknown, or other
  modified_base (93)..(96): a, c, g, t, unknown, or other
  modified_base (103)..(104): a, c, g, t, unknown, or other
  modified_base (112)..(112): a, c, g, t, unknown, or other
cngagangaangggaganaggnngggaacaagccnnngnacgnngcacnngcacaacgnaaggaagagaggagagcnaagnngcaggcccaannnncacaagnncggccagnaccaaggcacca

SEQ ID NO: 2517 - DNA, 129 bp, Lilium asiatic
  modified_base (7)..(7): a, c, g, t, unknown, or other
  modified_base (9)..(10): a, c, g, t, unknown, or other
  modified_base (15)..(15): a, c, g, t, unknown, or other
  modified_base (22)..(23): a, c, g, t, unknown, or other
  modified_base (25)..(25): a, c, g, t, unknown, or other
  modified_base (27)..(30): a, c, g, t, unknown, or other
  modified_base (39)..(40): a, c, g, t, unknown, or other
  modified_base (49)..(49): a, c, g, t, unknown, or other
  modified_base (64)..(64): a, c, g, t, unknown, or other
  modified_base (70)..(71): a, c, g, t, unknown, or other
  modified_base (73)..(73): a, c, g, t, unknown, or other
  modified_base (81)..(81): a, c, g, t, unknown, or other
  modified_base (86)..(86): a, c, g, t, unknown, or other
  modified_base (90)..(90): a, c, g, t, unknown, or other
  modified_base (93)..(94): a, c, g, t, unknown, or other
  modified_base (100)..(101): a, c, g, t, unknown, or other
  modified_base (106)..(106): a, c, g, t, unknown, or other
  modified_base (108)..(108): a, c, g, t, unknown, or other
  modified_base (110)..(111): a, c, g, t, unknown, or other
  modified_base (124)..(124): a, c, g, t, unknown, or other
ggcaagngnnagcanacgcganngnannnncgcccgcgnnggcgccggngaaggggaacggganggggcnncnacaggcangcaanaaangcnngaaacnncaacnancnngaaaggagccacngagaa

SEQ ID NO: 2518 - DNA, 396 bp, Lilium asiatic
  modified_base (100)..(100): a, c, g, t, unknown, or other
  modified_base (340)..(340): a, c, g, t, unknown, or other
gcgctcaaatccctcttcccctctctttcaactaaaatctttaatggcgcccaaggctgagaagaagccggtggcggagaagaagccggccgaggagganaagaagtcggtccctgcagagaagaagcctgcggagaagaagcccaaggcaaggaagaaggtcccggcctccaaggagggggcctctgacaagaagaagaggtcgaagaagtcagtggagacctacaagatctacatcttcaaggtgctgaagcaggtccatccggacatcggaatctccagcaaggccatggggatcatgaacagcttcatcaatgatctcttcgagaagatggcacangagtccgcccgcctcgcccgctacaacaagaagaacaccatcacctcccgggagat

SEQ ID NO: 2519 - DNA, 197 bp, Lilium asiatic
  modified_base (67)..(67): a, c, g, t, unknown, or other
gatgttcagagactcacccaacctgtctgacgtggtatctgtcttcttcgatgaaggaaaaactganggcaggaggcagagcttccaccgtgacgtcgaagacaattgcggctccgatgatgaccaaaggcggaccgctgatggcagagtcgcagagaccaacaatttctgggaaaaacaaaatcaactacttgaag

SEQ ID NO: 2520 - DNA, 376 bp, Lilium asiatic
  modified_base (74)..(74): a, c, g, t, unknown, or other
  modified_base (103)..(103): a, c, g, t, unknown, or other
gaattacccgggctcgaccgcacgccgtccgcgcctcctctttccgacgactttcgccggaacctctatatatnggccgatccatatgcctcgctactgccgngacttccgaaagagattcaagagctgctttcgccggttattatccatctgagggtcctgtcttaacctcgcgtcacttgtggagcgaaagtgatttacgtgggagctcttcagagtatcttcctagtgataaattaccatcactgtctggaggttatgggctgaatgataaagtgagcttgggcagtcgtggtacaccagggcttggttctctggctcctggagctaaagggcttgctcctctggaagatgcaacattacttagaaaggatgt

SEQ ID NO: 2521 - DNA, 217 bp, Lilium asiatic
tgatcaactcatccccaatcaaggagtatgaggctattgaactgttgtgagctgatgctttccttgtcagcagcaacccatatcaaatgcatgtagagcatatgatttctttgtttatttaatattctgtcatttactcaatctgtctcgtttggttaggctgctattgggaccattgatttcattatcaacactgtattttcaaattaccatcctt

SEQ ID NO: 2522 - DNA, 313 bp, Lilium asiatic
  modified_base (23)..(23): a, c, g, t, unknown, or other
  modified_base (30)..(30): a, c, g, t, unknown, or other
cgcgtacgctatgtttgaagtanccaccanaaattagatttgttttttcactctctttatgtaagttcagtattggttgttaaggtgatgcgtataccgtgacctcattttttttatatccgaattttggtttcccgggagatactgagctggtggttcagcaaaacgagcttcttttgcacaataatttgatgacttgtgtaaaactgttattcattagattttgtatgttgtcctttatataaattattaagctgacctttcctttttgcttataaaggaagtcaaaactttttggtttttttataaatta

SEQ ID NO: 2523 - DNA, 379 bp, Lilium asiatic
ggaggaaacaacgggtccttcaccgtgtctttcgcccccgccgcccctgtagagggggtggattggtaccagcggcctccgaacccgaaaaaccccatcgtcttcttcgacgtcaccatcggctccatccccgctggccgcatcaagatggagctcttcgccgacatcgctcccaggaccggcgagaacattatgcagttctgtacgcgtgagttcagaaaagcaggaataccaggtggttacaagtcatgccaatttcatcgagtcattaatgattataagattcaggcttgagatgccgcaaagggtgatggcaaaagatgtgcgtgcatttattgccattgcgtgtaaaagatgaaaactttatagctaaacatac

SEQ ID NO: 2524 - DNA, 246 bp, Lilium asiatic
accgaaaccatcacacaccatgaatcaccgtcgccgccgccgtcgctagatgttgccgagcaggagcagccgcaccacttcatccggagccagtcagacgcgcagccgacggcaggggaaatgccgcccaaactgtcggcgaaactcaaaaagtctgccagcaccaagtcggcttttggccactttgaagtaaaagacatagtgcaagcaccggaggaggaggaagaggtgaaggaggtggacgcc

SEQ ID NO: 2525 - DNA, 172 bp, Lilium asiatic
  modified_base (22)..(22): a, c, g, t, unknown, or other
  modified_base (25)..(26): a, c, g, t, unknown, or other
aatttattgtgttctcaatcanaannagtggcatatgtttgacgaaattcatctaccactttactcccctttacaacatcaatgcttatttgcctgtctttgaatcattatatttctctggtgccttgagggcagcgacatcttgccaggcctttccccaatgtgtctttca

SEQ ID NO: 2526 - DNA, 391 bp, Lilium asiatic
agcatttcggcgttgttgggctcggttgtcttgtgcacgtggctgtgaagtttggaaaggcctttggaatgaaggtcactgtgatcagctcatccccaagcaaggaggaggaggcgattgaacggttgggagctgatgctttcctcgtcagcagcaacccagagcaaatgcaggtagagcagatgatttctttgtttatctaatattctgtcatttactcaatctgtctcgtttggttaggctgcgatggggacgatggatggcatcatcaacactgtatctgcaaatcaccagcttgctcccttgatctttctgttgaaggcccatggaaagatgattatggtgggtgctccagagaagcctttggagctccctgttttctctctgatca

SEQ ID NO: 2527 - DNA, 383 bp, Lilium asiatic
gcgacttcgtcctgtctggttgaactgattgatcaaccttttgtggttatcacattgggcgagattgagattgtcaatctggagagggtaggtctgggacagaaaaacttcgatatggccatcgtgtttaaggattttaaaagagatgttcttcgcatagattccattccatcgacttctctagatggaatcaaggagtggcttgacacgacggatctgaaatactacgagaagcatgctgtatctgaattggcgcccgattcttaaaacaatcattgatgatcctgaaaaattcatcgaagatggtggatgggaatttctgaatttggaggtaaatgattcaaactctgattacaatcaaggttccgatcaaaggttccaac

SEQ ID NO: 2528 - DNA, 399 bp, Lilium asiatic
  modified_base (20)..(20): a, c, g, t, unknown, or other
gggcgaccaacgcgttgtcncattcaactatttcattttccatttatctttactcccagaccgacttcaccatgaccttttacaaaccgatgcgggcttcaccaccgtcacctcctattctgccgacgtataagcctgtctcaccggcatactccacaccaacctctcccgcctctcccaactcctcttctgcctcgacatctagtggcgccctatcttcatccgcattcagaaccccttcttcgtgctccaactctgcgtatgccgccgctgcctcttcttcctcattaaacgcgcctactccatcccccaaacgctcttttacttcattcgcgacgatcgcttcacattcattcgtgtcgacatcggtgaggatgtggagaaaatcatctatgagca

SEQ ID NO: 2529 - DNA, 410 bp, Lilium asiatic
  modified_base (15)..(15): a, c, g, t, unknown, or other
  modified_base (24)..(25): a, c, g, t, unknown, or other
  modified_base (31)..(32): a, c, g, t, unknown, or other
  modified_base (68)..(68): a, c, g, t, unknown, or other
gggggacccacgcgnccgagcatnncggcgnngttgggctcggttttcttgtgcacgtggctgtgaantttggaagggccgttggaatgaaggtcactgtgatcagctcatccccaagcaaggaggaggaggcgattgaacggttgggagctgatgctttcctcgtcagcagcaacccagagcaaatgcaggtagagcagatgatttctttgtttatctaatattctgtcatttactcaatctgtctcgtttggttaggctgcgatggggacgatggatggcatcatcaacactgtatctgcaaatcaccagcttgctcccttgatctttctgttgaaggcccatggaaagatgattatggtgggtgctccagaaaagcctttggaactccctgttttctctctgatcat

SEQ ID NO: 2530 - DNA, 290 bp, Lilium asiatic
  modified_base (7)..(7): a, c, g, t, unknown, or other
  modified_base (31)..(31): a, c, g, t, unknown, or other
  modified_base (33)..(34): a, c, g, t, unknown, or other
  modified_base (40)..(40): a, c, g, t, unknown, or other
  modified_base (90)..(90): a, c, g, t, unknown, or other
atttccnttttatttttctcttttatacccncnncaaaanctgggagacgttacacttaaatgagtacctgtaacaacatatccatcttnaatattaaattttttatttcatccctattttacatctttcatgacatggctaaagaataaatcttcatagataaactcttttattcattcaaacccggtaataatgctctttttatagatttatataatgccattctataacttaacccatcaactctattatctactccttcctttttatacaaaacaaaaattaattc

SEQ ID NO: 2531 - DNA, 357 bp, Lilium asiatic
cgaggaacaccactttgaatccaaggccgatgccggcgccttcaagacttacccgcagcaggccgggacgatccgcaagaacggtcacatcgtcatcaagggccgcccttgcaaggttgtggaagtttctacctccaagactgggaagcatggccatgcaaaatgtcactttgtggccatagatatcttcactgcaaagaacctggaggatattgggccatcttccattattggtgaggttccacatgttaatggtggggactatcagttgatggacatttatgaagatggatttgttagttagttgactgaaagtggcggcaccaaagttgatctgaggctcccaactgaagatgc

SEQ ID NO: 2532 - DNA, 297 bp, Lilium asiatic
acgagaccaaggcagaaagatacttctaatttcgaatttcaacaccttctacatcttctaagtcctttcctaaaaatggagaccccacttctgcaaaccttcttcttttccactgaaatatacaagcgcatcttccctgtaaacgacatctattgcatcctccaccgtttgcatactccaccaatgagctccagaagaatccataagatgaaccatacatacctcaaatcacataaggtatgaatcacttacatctaagactacttattgtctctttttatataaagagtggatcta

SEQ ID NO: 2533 - DNA, 414 bp, Lilium asiatic
  modified_base (50)..(50): a, c, g, t, unknown, or other
agcatttcggcgttgttgggctcggtgggcttgttcacgtggctgtgaantttggaaaggcctgtggaatgaaggtcactgtgatcagctcatccccaagcaaggaggaggaggcgattgaacggttgggagctgatgctttcctcgtcagcagcaacccagagcaaatgcacgtagagcagatgatttctttgtttatctaatattctggcatttactcaatctgtctcgtttggttaagctgcgatggggacgattgatggcatcatcaacactgtatctgcaaatcaccagcttgctcccttgatctttctgttgaaagcccatggaaagatgattattgtgggtgctccaaagaagcctttggaagctcctgttttctctttgatcatggcttggaaaatattggcgggc

SEQ ID NO: 2534 - DNA, 298 bp, Lilium asiatic
ggggcgacccacgcgttcgcagttccccatttctccctaattcctagcctcttaatccccaaattccttaacgcgaaacgtgatccttttcgatggcccgtactaaacataccgcccgcatgtctaccgtcggaaaggcccctctcaagcagctcgccaccaatgctgctcgcaagtctgctccgacgacaggcggagtgattaagccccaccgctaccgcccctgtacggtggcgcttcttgagatccgtatgtaccagaatagcaccgagcttctcataaggaatctgccgttcca

SEQ ID NO: 2535 - DNA, 170 bp, Lilium asiatic
atcaaggctggcctctcattttcggtatgccgcattggccgctacctcaagaagggccgctatgcaaagcgtgtaggttctggagctcctgtctaccttgccgccgtgctcgagtaccttgctgctgaggtgcttgagctggctggcaatggttgcaaagacaacaagaa

SEQ ID NO: 2536 - DNA, 417 bp, Lilium asiatic
ggcacatgttgcgtatctgttgtctactgaacctgctgacattaaacttggtatcgggggcttgagcatgggtgctgggattgctctatactctgcgacttgttttgctcatggaaactatggaaatggcaattcttatccagttaatctaagtgcagtggttggtctaagtggctggcttccatgtgccaggagcttgaagaacaagttggatggttcacaggatgcttcaagaagggctgctgaattaccgattttgctctgtcatggaaaaggagatgaggtgatcctctacaaacatggagacaaatcagctgaggttttgagatctaccggttttcagaaagttaccttcaaatcatacaatgggcttggccactatacagtcccggaggagaccgaagatgtttgcaaatg

SEQ ID NO: 2537 - DNA, 211 bp, Lilium asiatic
tactaccaccactatagatcggcagtatctttaaacatttcaaaagtataaagggggtgtcagttctgatcaaacactctacttggtaagttcacaaaattatatacttattttatgtaagggcgattaaagacaaaaacaacgcacgtgttactcccctccccaacataaatcagagcaagatcctctcattacctctagaggaactacc

SEQ ID NO: 2538 - DNA, 431 bp, Lilium asiatic
cccacgcgtccgctgaattagagaagaagaagcagaagaagtttgaagaacagcggagacttgacaaggaaggtgctgcgatagccgaatcagtcgctctccacgtcctgggcgaagacactgatgaaccctacctgaaccacggcacatacaacccttgggaacattcttgtaacatcggcctctacatgggttgtgcaactgatctgtacgggtctgcttgcagatggaatgtgcctggcatgcatatgagaaaccttcaaggaccgtattacgagggatcaagtcgaggggtagacatgtcggtggggctcatagcagcacaagcagtctcgacactccatattggcgaagatcctcttggggagcagtttactcatgcgagagcatccttcttcaatggaatgattggtaacagcaatttgggcact

SEQ ID NO: 2539 - DNA, 422 bp, Lilium asiatic
gcttccacgactgttgaaacaattgcatcttcggatcctgcagtgcttgttgtgtctgctggagcagcgtttcttgcataccttctcctaccaccactatggtcggcagtatctttcaactttcgggggtataaaggcaatctcagtcctgctcaaacgctcgacttggtaagttcacaaaattatgtacttatcgacgtaaggtcgattaaggacaagaacaaggcaggtgttcctcgcctccccaacattgctaagagcaagatgttcgcagtacctctagaggaactcccaggcaatctgaagggcctcgttcggaatgtgaagaaagccgaagcagaaattgccgcattgaagatttcttatctaaaaaaagttggcaaaaatactaacatcgtgataatggactcgtattctgatac

SEQ ID NO: 2540 - DNA, 408 bp, Lilium asiatic
catccatcctgctcatcaagttccatgtctacagacaccaagtgtcaagtttgaatgtgaatctgatccttctgctttttataacgtccctgacactgttataaattatgacccaaaatgcatggagagttttgccaatcaaatgtacaagcccccaattgtgacagaagagaagttaggaaagcgtcaaagacatcaattgtctgacacattgatgcctgaacatcagcagaagcagtcttctttcacaagcaaagtttcaactcagaaattccatggatattgtcaagagattggagctgacagtagagtccagaatgcgagcttagtacctgcactggaagtagattcttcggtggcacaatcaggctccttcattgcatctgttcctgatgatctttcagtaga

SEQ ID NO: 2541 - DNA, 199 bp, Lilium asiatic
acgccacgcgttcgcggacgcgttggtgctggctttgtgttcccgcgactccctttttcaaatgtgttcgcgtccctggtgctggaggcaagagccttcacacctttggtgggctcggtcgtggcatcttaggaactatcggccctggagctggtacccgcacaagtgcaccgagaggagatactcccttaacttgggt

SEQ ID NO: 2542 - DNA, 409 bp, Lilium asiatic
cggacgcgtgggtgctggcgggggtgttcccggactcggctttggcggaggtgttccgcgtcgttggtgctggagtcggtggtgttggtggcttgggtgggctcggtggtggcattggaggaactagcggccttggggctggtaccggcagtggtgcacgtggcggattactcccttgagttgggtgttggtttagttttcgtgagtaacgcatgcatgcattacgttgttgcaggggtcatggatgttagggtttggtctttttcttgtctagggatttaagtttagtttgttgaagaataatagtcattagtgtctaatgtgtgtcttgtatggataatcaagtcggtggcgtcgtttggttttaatgtaggggatggttctttggttgcatagaaataatgttacc

SEQ ID NO: 2543 - DNA, 406 bp, Lilium asiatic
  modified_base (370)..(370): a, c, g, t, unknown, or other
gataaatcggttcagaccaaatatattatttgatgggtgcaaacctttttcggaagatctgtggaaagttatgaaactaaacaagctgacctttcatggcgtaaagttatgttctcgctgtaaggtacccacaataaatcaagaggatggtatcgctggcactgagccgaccgaaactctcatgtcgttccgatccgaccgtgctctgcatctgaaaggaaaaccccaagggaaggtgtacttcggacagaatttgatctgcaaggaatcgctgtctctaggcaaaggcaaggttgttgcagtaggagatccagtttatgtcctcgaaagaatcacttcagctgctgaagcagctgtatgaacacagaanggctataggcatagctaccctcgtgtatcatgctac

SEQ ID NO: 2544 - DNA, 332 bp, Lilium asiatic
cattaaactgtacgatccgagaggatttttcgatgggtgctaaacaacacctgagcgcgtgcgggaagaccccgaacggcgccggcggccccttcatagtcataaattctgctccggcggaggggccgcctccgttgatcaagcggcaacaagctgtatatcaggtgatacggcagcagtaagatgaatcttacatctccgtgcagtcgagtgaccatgaaagacgtaagggagagagtacctatatatactattgctatcgaagcataaggtgggcttagcttgatgcacaggcgctgggcgacgaaaaacacagtatgatcaaccaagaa

SEQ ID NO: 2545 - DNA, 421 bp, Lilium asiatic
  modified_base (109)..(109): a, c, g, t, unknown, or other
gggggacccacgcgtccggtcaaggcttgcctttagttttttgtatgccgcgtcggtcgctacctcaagaggggcggttatgcaaagcgtgtagggtgcggagctccantctaccttgccgtcgtgctcgagtaccttgctgctgaggtgctggagctggctggcaatgctgccaaggacaacaagaagtctcggatcatcccgaggcacgtctgtcttgctgtcaagaacgaccaggagctgggcaagctgctcgctggagtcaccatcttccatggtggtgtcatccccaacatcaacccagtcctgctccccaagaaggcagctgaaaaaggagattttgctgcgcccaagtcccccaaaaaaacccctaaagcttcgaagaaagccaccaagaccccaaagaaagcttaaaagggtg

SEQ ID NO: 2546 - DNA, 416 bp, Lilium asiatic
acccacgcgtccggaagaatttctggatagacattcatgtttccatattttctgaagagcatgacacctagggcttttgaagcaggacttggtcaaaaggatggtgaacttgcatcatatatttctcgtttggcgtccttggaatctattcgtgactctctggcagaggaactagttaagatgacagcagagtgtgaaaagttgagagcagaagcagccaatgttcctgggttacgagcagagctagaagctttgaggcggaggcattcttctgcactagaactgatgggggaacgtgatgaagagttggaggaactgaaagccgacatcatggacctaaaggagatgtaccgagagcaaatagatttgctcgtcaataagctgcaaatgttgaactctttaattgctgcagctta

SEQ ID NO: 2547 - DNA, 423 bp, Lilium asiatic
  modified_base (317)..(317): a, c, g, t, unknown, or other
gtttaggcctcttttcatccgtgttctagaatgggctgaatctggactagaaggaagcgagtcattaactacagtcttagatagggcaatatccttctacaaattagtcaacaagcttacagagcagcatcgatctttgttcgttccttacttcaagtatttgattgagggatttactcgttacttgactgaagaacaaggtgctgattcaatgcctttgaccaagaaaagaaagaagtccaagtccaagtccggtgaaacaaaaccaagtgatattgctttttcacctaagcaatggcatctcagagcattaattntaaaggccctatatcaatgtttcctttatgattcaactgacctcaaagttcttgacgcggctaactttcaggttttactcaaacctatagtttctcaacttgtgac

SEQ ID NO: 2548 - DNA, 421 bp, Lilium asiatic
  modified_base (16)..(16): a, c, g, t, unknown, or other
gggcgacccacgcgtncggcggagaagaagcctgtggcggagaattctgccgccgaggaggagaagaaagctgccgcagccgagaagaagccggcagagaagaagcccaaggccgggaagaaggtcccggcctccaaggagggggagaagaagaagaagaggtcgaagaagtcggtcgagacctacaagatctacatcttcaaggtgctgaagcaggtccaccccgacatcgggatctccagcaaggccatggggatcatgaacagcttcatcaacgacctcttcgagaagatggctcaggagtctgctcgtctcgcccgctacaacaagaagaataccatcacctcccgggagatccagaccttcgtccgccttgtccttcccggcgagctcgccaagcatgcagtctttgagggcacca

SEQ ID NO: 2549 - DNA, 396 bp, Lilium asiatic
  modified_base (18)..(18): a, c, g, t, unknown, or other
cggcgggacccacgcgtncgcggacgcgttggtggtgctcttgtcattgtgactgagattgaccccatctgggcccgggaggctcttatggagggtcggcaagtcctcaccctagaggatgttgtctctgaggctgacatttttgtgaccactaccggcaacaaggatatcatcatggtcgatcacatgaggaagatgaagaacaatgctattgtctgcaacattggtcacttcgataacgagattgatatgcatggtttggagaccttccccggcgtcaagcgtatcaccatcaagccccagactgaccgctgggtcttccctgacaccaacagtggaatcatcgttcttgctgagggacgtctcatgaacttgggatgtgctactggtcaccct

SEQ ID NO: 2550 - DNA, 393 bp, Lilium asiatic
  modified_base (21)..(21): a, c, g, t, unknown, or other
  modified_base (24)..(24): a, c, g, t, unknown, or other
ttttgggtcgagcgacgcgtncgnccaaggagatcgaagctttaccctcgaagtttcggttactcatgcgcctcatggaccccggctcctcatggcctagacaaggacccaatgatgatggcttctcgaggccgaaaggcggcgctgctgttgctgataagaaaggaaaggggagcaagccagaggatttggtggaagagaagaaaagtgaagacaagccgggcaagaaaaggaaaagggagggagcgaaaggtcttcgatttcaggaattggaacccgagggctgttccttgggccagaaaaccccgaaaaaaaaattttctcgaaacaagggaatttgaacccaagaaacccaaaaaaggttatttttccaacctttcttgggcttaaaaa

SEQ ID NO: 2551 - DNA, 361 bp, Lilium asiatic
gaatgttaatgggttgagggcgttactcaagttggagagttttctgcacttcaactggcacagtcgaaggattttgatgtcctttgtcttcaagagacgaaaatacaagaaaaagacgtggaagcgatcaagaagagttcaatagatgactatgataacagcttctggacaagtagtgtttcaaagcttggctattctggcactgcaattatatcgcggtgttaataacttgggtacttgagcaccgatcaatataagagtgaaaggtgatgtggaggagggacttcaaaggagaggggcttctcttttttcattcatgaagatggattgcaataacgtatttggcttcattcccaaaaca

SEQ ID NO: 2552 - DNA, 277 bp, Lilium asiatic
aaactccggggagatcgacccacaccactcatcactcttaactgcctcttattacaatctaaactctaatatgttatgtattataagaaataacagcccaaaaaataggcgtgtaagaagtacattccgtgaaacttaaacaacatattttacgatgaacatgttaagagttacctgtaactacaagatcttgcataacaagtaatttcatttttttaacttaagttcatccgcattagtttgatactttcacttaaaacaatattaaaaaattaca

SEQ ID NO: 2553 - DNA, 404 bp, Lilium asiatic
  modified_base (394)..(394): a, c, g, t, unknown, or other
gtcatgttgatggagatgtgaattgcgaaactggcttttctcccttccctggaaacatgaaatcagttgattttagaacttgaaccatatattgaagagctcaagaaaacacgaggtgcaatcgcagagtttgttaatcctaaatacaaggactctaccaagacatcgttcaaatcatcaactagattggaatgcatgatgcaagattacccaaaaacactacccccatcagcaagggttggatttacagtaatggatacatggctcgcgtatgcacctgtgaagaataatcctgaagatgctgctaaggtaccaaagggaaatccttatcacagtgcaaccagtggagaaatggctatctacagggcaaatagccttcatcttagaaaggccngtgtcaatgt

SEQ ID NO: 2554 - DNA, 392 bp, Lilium asiatic
gtcgactggaaggagacccctgaggcctatctcttcaaggccgatctgcccggggtgaagaaggaggaggtcaaggtcgaggtggaggacggccgcgttctcaagatcagcggcgagcggaggagggagcaggaggagaagaccgacacctggcaccgtgtggagcgcagcagcggtcaatttgtccggcagttccgactcccggagaacgctaaggtggagcaggtgaaggcggcaatggaggacggtgtcctgactgtgactgtgcccaaggaggaggtgaagaaacctgaggtcagatccattgatatctcgggttgaagcatcattctgatttgctttgcgtcttgtctcatctcgtgtctgttctagtcagtgtatctcaggtgttt

SEQ ID NO: 2555 - DNA, 410 bp, Lilium asiatic
  modified_base (375)..(375): a, c, g, t, unknown, or other
actcaatgacctttttaacctgcacgattgatttgatgatgaggggtggctaaagaggggcagaaaatccatgattgagacatttcctcaagaggatccattcagtatgcttgttcctgctgggtttgacataaacaatggccactttgagttgccagaggatgatgatttgttgctgagggccgattttgtaagagaggttgatgcattgctgcaagaggtcagagcggaacagggtaatctccaagccccagagggactagatcctgaatctgtagcaacaagattgaaacagcaggagaagcagcggactattcaccaagttgaggctctactagaacttgcaatttcgttgcagtggtgatcataaccgangtccgttgttttcatcagtcatctagttatgaaca

SEQ ID NO: 2556 - DNA, 408 bp, Lilium asiatic
  modified_base (56)..(56): a, c, g, t, unknown, or other
gggcgacccacgcgttcggaaactcttcctctatgatttttacttttagctgtcgnatggggtctataaagcaacgtcatctggtgggatgaaactcgaaccgtctgccttcaatggctcgtatcctgcacaggttcggttcaaggttcacctggattgccagcctctgcctgaagatgtctttaagaatgcaatcaaggaaaatgtcgattcgaagcggaactttttcaagactgaacttactgaccagcatgtgagaaagctcattcagctattccgttctgctactccggctgctactgctattccaactcatccacttcctgggcttggtgtgccacaagtgcctttgatacctgctgtatatgttcatgcagacagagacgttgctccgatggctgttccgcg

SEQ ID NO: 2557 - DNA, 342 bp, Lilium asiatic
  modified_base (11)..(11): a, c, g, t, unknown, or other
cacgcgtgcgngttcttttaaatttatcaatttccctttataggaaaccctaattagcttggggggggcgtacgaagcagaccgcccgcaagtccactggcggcaaggcccctcgcaagcagctcgctaccaaggctgctcgtaagtcggcaccgacgaccggcggagtgaagaagccccatcgctacaggcccggcacggtggcgctccgtgagatccggaagtaccagaagagcacggagcttctcatcaggaagctgccgtttcataggctggtgagggagatcgcgcaagatttcaagaccgatcttcgtttccagagccatgccgtcctacctctac

SEQ ID NO: 2558 - DNA, 407 bp, Lilium asiatic
atgacataccaatctatgtgttaaagttaagctctttggtgcacatcgaaagggccagttttgcccttaaaaggaaacatgacatcgggttcaatgatatcgaagaaactaaagcatggagttctgaagaaacagatgcccttgaggaggctagattgggtattgaacaagtagtgattccaaagggggagcctgtggagctgcttccaaggcctccacacttgatttctgctcagattcaccttattgaaagatacaaacttaaatgggagaaaatcgtccaagattctgatgcctgtttacgtattcttccttttgaggcagataacacaatggacactgagcaactctatgaagcaagtagtgagcacgaggagttgactgtatacgacgacatgaatggttca

SEQ ID NO: 2559 - DNA, 335 bp, Lilium asiatic
  modified_base (7)..(7): a, c, g, t, unknown, or other
  modified_base (15)..(15): a, c, g, t, unknown, or other
gggggangcagcgtncgctgattgatggctttttgcattatggttggctgttatttgagcaactttttgtacgggaagctggtaatcaagggaatgcaatggcacgggatgatttgcgcgtacagtttaacagacttgtacgtgcacaatatgtggaacgttgtccaaggcctgaaccgtttctctcggatgctgatgataaaccagcttcatcgagaagacgtggtgctaagacatttgaagaaactcccactattgaacagcaagctttaacagcttcagctctttcggttgctgtacggtttttttcgctaactgatattggtgcaaatacc

SEQ ID NO: 2560 - DNA, 396 bp, Lilium asiatic
tctcagtcgagctccaccatcttctccggcaatcaaaccccatctcttagatcagttggttcaccatatcacagcaatgtaagagcttcatcaccctaagcatttttccccaacctatttcatattctattgagtgaatcgacagatctgatcactttctctgatggctatccccgagttcaatcgatcactcgaccttcgattgcttcattattcttcaattattttccatctatctttcaggtatcaacaaatttactctagcaattatctgattcatttcttatttttgatttcagatgtaatcaaatgatcaatagttggatcttttattggatatataaataagaggaatcgtagatggagaaggttgggtgtcgagttacttatagatcg

SEQ ID NO: 2561 - DNA, 422 bp, Lilium asiatic
  modified_base (8)..(8): a, c, g, t, unknown, or other
  modified_base (13)..(13): a, c, g, t, unknown, or other
  modified_base (62)..(62): a, c, g, t, unknown, or other
gcgtccgnctgantctagctcctccatcttctcctgcaattacaccccatctcttacatcanttcgtcacgttatcacagcaatgtgagagcttcatcaccctaagcatttttccccaacctatttcatattctattgagtgaatcgacagatctgatcactttctctgatggctatccccgagttcaatcgatcactcgaccttcgattgcttcattattcttcaattattttccatctatctttcaggtatcaacaaatttactctagcaattatctgattcatttcttatttttgatttcagatgtaatcaaatgatcaatagttggatcttttattggatatataaataagaagaatcttacatggagaaggttgtgtgtctagttacttatacatcgggaattgaatggctttaaag

SEQ ID NO: 2562 - DNA, 408 bp, Lilium asiatic
gcaatctcgattcgttaactgtagagctttctcgatctcgacttccatcgccgccgaggatgggcaggggcaagttcaagggcaagccgacgggccgccgtaacttctccaccgtagaggagatgcgtgctggtacatcatctcgtcccaagtcctttaagagggaggaagccgaagctgatcctgaagtagaaaatgattctgaagaggagtccggagatgagtctggagtagaggttgagaaaaggaaaggtactcagggaattattgaaattgagaatccgaatttggtaaaaccaaagactacgaaagctagagaagttgatctcgagaaaacaactgaactatcacgacgtgaaagggaggagatagagaaacagcaatctcatgagcgatatatgagaatgc

SEQ ID NO: 2563 - DNA, 440 bp, Lilium asiatic
  modified_base (26)..(26): a, c, g, t, unknown, or other
  modified_base (37)..(37): a, c, g, t, unknown, or other
  modified_base (72)..(72): a, c, g, t, unknown, or other
gaaaaggggcgggagccacgcgttcngtaagagtatncatttttacttttaattttaaaagagaaggagcancaatggggacggtgatataaaaatgagtgagagcccattctccctcaaaatgtttacgaacttgaatttaagctgaaggagagacaacaatcagaatcataccacgaaaaaaaggttcaggagttcgagttcaagcttaaagaacaagaatcaaagcttatagaacaagaacactttaagtctctagctgaacaaaaggctaaggaacttgaggagaaatatgagtctgagttgatgcttaaacagaagaagattaaggagcttgaagaaaagttgcgacattcaagggaacagaaggatgaacacgtatgttctgaatcaattgttgttcaaaaagtaaaagaactcgagataaaaattaagaacat

SEQ ID NO: 2564 - DNA, 436 bp, Lilium asiatic
  modified_base (12)..(12): a, c, g, t, unknown, or other
  modified_base (120)..(121): a, c, g, t, unknown, or other
  modified_base (277)..(277): a, c, g, t, unknown, or other
gacccacgcgtnccgctggttgcttctgggtcttacctctgcgttctatcgttcctcctcatcgtccctcctgcttctgcgttcacacagtcttcacgtgttggtggtgacccaacaagnnggggccggggaaggtcggtgtcttgggaggggggtacaagggagtacaggccttggggattacaaccactggctccagaagagggtggagagtgggaagaactggaggaagattcggtcttgcttgatggatagcaaggtgtgcaagagtctgcangcggagaaccggacgtttgcggagttcgtcaatgataatttgtcgccgattcagtctggatgctgcaagccccccactgggtgcaatttcactttcgtggatgcaaccgtcttgacgaagccacctggttttaccttcgacattcctgactgcaataca

SEQ ID NO: 2565 - DNA, 134 bp, Lilium asiatic
ggccgacccagcgtccgggggaaaggcaccctcgtagctctcaggctcttggctttacgccctccgcgtggcgactcaccaggctctgaccgccgaggaataaagccgaccccgtcaatgctctcaaggacaag

SEQ ID NO: 2566 - DNA, 202 bp, Lilium asiatic
gcgcacactcaacaatatcattttacatttatcttcacccccatacccacttaatcgagacctttttcaaaaaccggggccgtcttcaccaccttctcctcctatacttccaacttataatcctctctcaacttcttacttcacaccaaccgatcccgccttttccaactactcttcttcctttacctttatattaatccct

SEQ ID NO: 2567 - DNA, 352 bp, Lilium asiatic
cggacgcgtgggcaagaagtttccactgatggcgaccttccaatcttcctccatcgtcaagctccttacctgatggcgactcctccactacggcgagcttacttcatggccaaggaagaagacgagggcgactgcagtgaagacgacatctgaagcattctccaccgtctgcatgcaccaccagtgagctccagaagactcgagaggatgaaccagagagccgtcaatccaatcaaagtaagatttacttcgatttagtactaattcttgtctctttttatagaaagtggggatctataaaaagccgagtagatcaagggaagaatatcatcggggggtgttcccctggggg

SEQ ID NO: 2568 - DNA, 386 bp, Lilium asiatic
tgagtgggtaccagtaccaaaattttctgttcaccgcaagcccaacaacagcagtgattttatcatgcttagttttagatagcagtttaatggtgacattccttccaccagcatcaagaattccagaggccaaaatagcacccatcttgctcattgtatcctcatgcttatcaagaattatcttctctagttgtcgcctgaatgtaccaacacgggagtcacaagactcattggtctggatcataaccatagccatagctatgagggctccctgacgtacaaagtcaacaacatctgatgtaagaggctccaacaaagagatggcctcactcaaaccagtaccagcacaggaaatccctactgctagggctgcaccataacggaca

SEQ ID NO: 2569 - DNA, 251 bp, Lilium asiatic
ccccccccccccgatcaccaggttgggcccccagatataggcgacctcttcaatgctctcaaggacaatcttcatagcctatcggtgcagctctcgtagttgctgtagagcctttccccaaatgttatgaatcgcgttcaggctctgcgtgagatttatatccaacatgactagattgatgcaaaatttttttgaggagagaacatcactttaatttatgttccaaaatctttattatcctttattcacca

SEQ ID NO: 2570 - DNA, 314 bp, Lilium asiatic
gatttgatcaaatttagggctggatttgttctatcaggccgtcgtcatggcatccaagcggattctgaaggaactcaaggatctccataaggatccacccacctctcgcatcgcatgccccgttgctgaagacatgtttcattggcaagcaacaataatgggtcctccagacattccttatgcagggggagtctttctagtaaccatccacttcccttcggattatccctttaaaccaccaaaagttgcatttaggacaaaggtcttccatccgaatattaacaacaatgggagtatttgcctcgacatctttg

SEQ ID NO: 2571 - DNA, 149 bp, Lilium asiatic
  modified_base (57)..(57): a, c, g, t, unknown, or other
acccacgcgttcgctttaatcgtttttttcgacttggttttcacaaccccgtgatangcatcaggggggactgttagataatcgcgtaagtctatagaaaatgtgcatattttcattttttttttttaatagcatactaaataaattat

SEQ ID NO: 2572 - DNA, 271 bp, Lilium asiatic
ggggcggcgggagctcgtttgggttcgtctgcacctgcgccgacgtgaggcccggtgacgggtactgcacttgcggtgcgcataactttgcgagtcgctccagctgcttcaagtgtgggtccttcaaggatgagtctgctgcggtcggcggtggtgggtttgatggtgacttgccacgacaggggttttttttctgttgtggcggttgcggttgtggccccactgggtggaagttttgatgactggatttttacaaggaagggctgcaatg

SEQ ID NO: 2573 - DNA, 315 bp, Lilium asiatic
gtcttaaaggcgccctatatattttaggctcggttacgcccaacggcgcaaaacatcaggtcagtcccccatgaaccaagcgcgactccgcgaatcctcatagatacaacgctagcatacacacaaacgggagccctcgatgtagaggttgccaggagatacctgctattcgaatggaatggaatcccaatctaggcgtgtatgcgcgaatcatgtactacatatcgtatagtgtaaacataaaaatatgtgtaaaaacacaacattaagagtataggctgaaacataatgagcctaaatacacgatatatactg

SEQ ID NO: 2574 - DNA, 421 bp, Lilium asiatic
  modified_base (389)..(389): a, c, g, t, unknown, or other
cacagtcaacgatgtcagtgtcgatcgagcttcactcggagaccgacttcaccgtgaccttcaacggcaccgatgccatcttcaccaccgtcaccgcctatgcggccgacgtagaggcctggctcaccggcatactccacaccaaccgcgcccgcctctcccaactcctcgtcggcctcgacgtcgagtggcgccctagcttcagccgcatccagaaccccgtctccgtgctccagctctgcgtcggccgccgctgcctcgtcttcctcatcaagcgcgccgactccatcccccaagcgctcttcgacttcatgcgcgacgatcgctttacattcgtcggggtcgggatcggggaggatgtggagaagatcatcgaggagcatgatctnggggtgggcaaggcggtggatctgcgggagct

SEQ ID NO: 2575 - DNA, 398 bp, Lilium asiatic
aattttgaattcgagggacgccccacgcagtgctacttacagtcgctgtctggttgaactgatcgatctacctcgtgtggttatcacattgggcgagattgagaccgtcaatctggacaggctagatcttttacagataaacttctatatgatcaggcggtctaacgcattataagagagatgtactttgcctaaactgatgtccatcttctatgtctaacaatgatgcaagagcggctatgcacgacttatctgacaaacatcgcacactttgtttgatgctaaagccaccccagtgctatatcaagcatatgttggaagctttcaaaaatgtattgatatggaggtctttgtggaaatgttctgactcctcacccactttaaattggcattcaggg

SEQ ID NO: 2576 - DNA, 416 bp, Lilium asiatic
cagttccccatttctccccaattcctagcctcaaaatccccaaattccgaaaccgtaaacctaatccgtttcgatggcccgtacgaaacataccgcccgcaagtctaccggcggaaaggcccctcgcaagcagctcgccaccaaggctgctcgcaagtctgctccgacgacaggcggagtgaagaagccccaccgctaccgccccggtacggtggcgctgcgtgagatccgtaagtaccagaagagcaccgagcttctcataaggaagctgccgttccagaggctggtgagggagatcgcgcatgatttcaagacggatctccggttccagagccacgccgtgctcgccctgcatgaggcggccgaggcgtatctggtatgactgttcgaggatacgaacctgtgcgctattcatg

SEQ ID NO: 2577 - DNA, 373 bp, Lilium asiatic
ttttgaattcccggggggaagactgttgggacagttggagctggtcgctttggctttcttttactccagcgcctaaaacccttcaactgcaaccttctgtatcatgatcggcttaagatggatcctgaactggagtcagctatatgggcaaagaccgaggaagatcttgatgctatgcttcccaagtgtgacataattgtcaacaatacaccccttactgagaaaacaagggggttgtttgacaaagacaggaaagcttgattgaagaaaggagttctcattgtgaacaatgcgcgtggatcgataatggacactcaatctgttgttgatgcttggtttatgggcatatagatggatacagcggggatgttta

SEQ ID NO: 2578 - DNA, 396 bp, Lilium asiatic
  modified_base (310)..(310): a, c, g, t, unknown, or other
cgacagctctgagcccaacggccaacgatatgtgacactaaacgggtctccgcataacgaaatcaaccacgataacatgttcaaaattgagaaagcaggtgctttgggctacaaactgctatactgccccagtgtagccggcgtccctgccgatggtccttgcggtagtctgggtatatacttcgaggatgggaacaggtggttggttctgagcgaccagccgttcttcgttgtctttgtcaaggcatgaaccctcgcgcatatccctattacgtacttggagtctcgtgaaataagggccttacgtccncgtgtctgctaggtgtattagtacgaggagtgtcatggaataagggctttttaagtccgagtgtttgctatgtatatcagtgcgtg

SEQ ID NO: 2579 - DNA, 372 bp, Lilium asiatic
attttctaaagatatactccattcacggttcgccagtttagctatgtttgggtgtggtgcgtctcgtgcgcatttccctccactgggaatcatgcaacaagaaatggcaatgtgcaacatgcccaattcagtggacatgatgaggtctacattccctcaggtttcccccatgcctcagttatcaagtgtatgggatgatgagcttcaaactgttcttcagatgggttttatgccaaaccagtctctcgcgattaccgatccaaatggtacgatgaagacggatgaatgaatcatgttctcgacaggtcttttatcacatcctaacctagaacattatgtagaaataaggagctctctgttgctgggggtttc

SEQ ID NO: 2580 - DNA, 300 bp, Lilium asiatic
cgtcagctctgatcccatacggcttttcgatttgtgacactaaacgggtctccgcatgacgggatcaaccacgataacatgttcaaaattgagaaagcaggtgctttgggctacaaactgctatactgccccagtgtagccggcgtccctgccgatggtccttgcgggagtctgggtatatacttcgaggttgggaacagggggttggttctgagcgaccagccgttcttcgttgactatgtcaaggctggaaccctcggccaaatccttataacgaacttggagcttgggaaataatgg

SEQ ID NO: 2581 - DNA, 341 bp, Lilium asiatic
aagagatcaagggagattgagacttctaggctccaatttcatcatctttgactttttctcgctaatccacgacaaattgacaccaaatctttggagatctgaagctctccaactaagatatccaagcacattttccctgtgagtgttttttattgttgcccgcctctctccacgattgcaatcatcggttcagggaggattcaataaatgaggatccctaattcaacatccttaagttctccgtcgtctaaatcaaagtttacttattgtcgattgttctctggctagggtttcagtgagaagatatttgctgctttgtgttggcactgtcgaaatctcat

SEQ ID NO: 2582 - DNA, 428 bp, Lilium asiatic
  modified_base (74)..(74): a, c, g, t, unknown, or other
aattaaggggccgacccacgcgttcgcggtcgcgtggttcataatttagggtttctttgtttgatggttctggncacgagagaatgatgttctaatgactaatggattattgaagctttcaaactgagattgtgatataggaccgctttgtttttgttgtgcctgcagatgcaggcaacatagtgtctgatagtggtgatgcacttggtgttcacttattttaatgatgcaggcaacatagtgtctgatagtggtgatgcacttggtgttcacttattttaatggttattaaaaatttatatggtctttgttgttgagagctgatatattatggacaatctatctataaaagagatgcatatgatgtcgatttattttccatcatgctatatttgagaattgaagtgataagttaaacaagtttatat

SEQ ID NO: 2583 - DNA, 327 bp, Lilium asiatic
tcgagcttgagttttacttctatacattccctttcttcgagaattctgttctcacgagaacatatcacatgattgatgaagatgatccaattctagagaaagcaatagggactaagattgtatggtatccaggcaagtgcttgacccataaaactatggtaaagaagccaaagaagggatctaagaatactaagcccatcacaaaaacagagcagtgcgagagcttctttaatttttttagccctccggaagtccctgatgatgatgctgatattgatgaaaaaaaaactggagaactaccaaatcaaatggagcaagattaccaca

SEQ ID NO: 2584 - DNA, 384 bp, Lilium asiatic
ggccgatcagaaggtcgacgacattgccgttggagttaagaacctcagcatcaccaacgccgagacacacaagaaaaatcggatccaggtctccaacacgaagaagcccctcttcttctatgtcaatctggcgaagagatatatgcagcaacacaatgaagttgagctttcggccctcggaatggctatttcgactgtcgtctccatcactgaaatcctgaaaaacaatgggtttgcagttgagaagaggatcaggacctccactgtgaacatgaatgatgagcccagagggcgaccaattcataaagcaaagattgagatactcctgggtaagacggagaacttcgatgagttgatggctgctgctgctgcagagcgggaagc

SEQ ID NO: 2585 - DNA, 397 bp, Lilium asiatic
cttattcaacccttcgggatttgagtggctaaagattgtcgaggactggactgattggaacaagtggatcggtaaccatgggggaataggtgtctcggcacagaaaagttgggaatcatggtgggaaaatgagcatgaacatcttcggtattcagggaggcgtgggatcgtggctgaaatattgctagctttgcgtttcttcgtctaccaatatggacttgtttatcacttgaatataacgcaaaagacgaaaagtattctggtgtatggtatttcttggcttgtgatctttggtgtattgcttgtgatgaagacggcttcggttggaaggcggagatttagcgccaacttccaactcgttttccgcctgatcaaattcttcatcttcgtcacattc

SEQ ID NO: 2586 - DNA, 322 bp, Lilium asiatic
  modified_base (51)..(51): a, c, g, t, unknown, or other
  modified_base (54)..(54): a, c, g, t, unknown, or other
tcggatcaagccacttttgtttgcacttttttttttattacccagaggcgnaanatcagggggggcgttaattacagggatcgggttgtttatgcaagggatgaactttacagaatgctaaatgaggatgagttgcgagatgctgtcttacttagtgttgcgaacaaacaagatctgcctaatgcatggaatgctggcgaaatttctgattagcttggtctgcatttattgtctgatcgacactggttcatacagagctcatgtgctacgttcagtttgggacttgtccaatggttggactggttcttcaacattatttttg

SEQ ID NO: 2587 - DNA, 369 bp, Lilium asiatic
ccaagtcataattcatatttgatttcctaattcattaacagagggccgaacacggggaatggaagaattacagatgaatgtgcaaaaggagtttcattctgtgaaccgtagactcaacattgctataacaagagttgaaaaaccttatggacaacctaatattcttgcggaatatatagctttacaattaaaaaatagagtttcatttcgaaaagcaatgaaaaaagctattgaattaactgaacaaacggatataaaaggaattcaagtacaaattgccgggcgtatcgacggaaaagaaattgcacgtgtcgaatggattagagagggtagggttcctctacaaacaattcgtgctaaaattgatta

SEQ ID NO: 2588 - DNA, 369 bp, Lilium asiatic
tcgtgcctatcaagccttgtagctttaaactttgacactgctcttttggatctgattccattccttgaatatgtggcaattcatataccttctgatataagacctgtacttgcatcttatcaaggccatgatatagcaagcgagtttatagagcgctcaaaagaataccagaggcgggtgcaagcacagaagcagaacaaaagtttttggcggcaatgatattctcccctgtggaattgatccggagtttaatgaaaaaataacaaggtctttaatccttacatttggagaattggtttactattttaatttgttcacacaacaaactttaccaaaatgcttgaaaatggcaaccttggatatttcttt

SEQ ID NO: 2589 - DNA, 416 bp, Lilium asiatic
  modified_base (52)..(52): a, c, g, t, unknown, or other
  modified_base (378)..(378): a, c, g, t, unknown, or other
tcgccatcaatgcatcaggtttcatgatgtttcttcgtttgatgatgataanaggaggggccggaagaagctgtcggatgataatgctcgccgccggaagccggcgccggagagaattttgttcgactgtgcaagcttttcttctcccttttatgatgatggacaacacatgaaacttccatacaaccaagcttctttcagtccaatcgggctatcaacaacttcaacatgggaaagttcttttgacttcaagcttggacatatgaaaggatccttgaagtcagccaaaggagacaatgaaggacaacttttgtctggcactggtttatcaaataccttgtccacgcttcgacatggctcgggcaggatgttgccatntcggggcagcagtgtacaggtcttcaatcaaagtcatg

SEQ ID NO: 2590 - DNA, 395 bp, Lilium asiatic
aacttttcaaaaccttgtatgtgtctagtttgtgagattaaattaacatgtgtgtggtcacctgcatgtgataacaccactctgtaatcacttacgacatacactaacttagcgactcttttatattataaatagaaacaaaggggatgtattaaatgagaaaaaaacatatttgaaactaaccagtttgtttggaaaccagttacaacaacttcagacaaagcaaagggatgctaatgtcactatttgagtctatgattgtcttaagatttgccatcaaatcagacgacgacttcctgaatgaagttggccaatattcaaatttattgttagtattacttgtaaaaaaatgaagcagcagttatatggtgtacacacaaaaaaatctacccatc

SEQ ID NO: 2591 - DNA, 381 bp, Lilium asiatic
  modified_base (338)..(338): a, c, g, t, unknown, or other
ctcatccctggcacaagtatcttccataagtgaatgccacctgaggctgtggatctggtctctagacttctccagtactcccctaatctgcgaagtactgctttggaggcattgattcatccattctttgacgagctccgtgacccgaatgcccgtctaccgaatggacggttccttcccccactgtttaacttcaagcctcacgagttgaagggagtacaaatggagatcatatttaagttgattccagaacatgcgatgaagcaatgtgccttcctaggactgtgagtgagtcccagctgggatgcttgtacctatgaacagcttatgtgtatctncaacctaagaaattagtatggtccagtgagtttgcagagcgct

SEQ ID NO: 2592 - DNA, 390 bp, Lilium asiatic
ccgaaatatcgttttgttgtcagatttacctataaggatatcaccgcacaaatcatatccgcaagcattgctggtgatatggttcttgctgcagcttattctcatgaactccctcgctatggtcttgaaattggtctcaccaactatgctgcagcttattgtactggtcttctgttggctcgtcgtgtactcaaaacacttgaaatggacgaggactatgaaggcaatgttgaggcctctggagaagatttttctgttgaaccttctgagagcaggaggcctttccgtgctctccttgatgttggtcttgtcaagacaactacaggaaatcgagtctttggtgctcttaagggagccttggatggtggtcttgatattcctcacagtgat

SEQ ID NO: 2593 - DNA, 327 bp, Lilium asiatic
  modified_base (23)..(23): a, c, g, t, unknown, or other
  modified_base (28)..(28): a, c, g, t, unknown, or other
  modified_base (61)..(61): a, c, g, t, unknown, or other
cacgcgtccgcctaaaatcggangttgncagtaagactaatttttatatcaccgcacaaancacatccgcaagcattgctgatgatatggttcttgctacaacttattctcatgaactccctcgctatggtcttgaaattggtctcaccaactatgctgcagcttattgtactggtcttctgatagctcgggcggtactcaaaacacttgaaatggacaaggactattaatgcaatgttgaagcctctggagaaaacttttcttgttaaccttctgagatcaggaagcctttccaagctcttctttatatatgtcttgtggggacaa

SEQ ID NO: 2594 - DNA, 397 bp, Lilium asiatic
cccacgcgtccgcggactcgtggtttatttctgctcaatggcgcaggccgtggaggagtggtacaagcagatgccgatcatcacccggtcctacctcaccgccgccgtcgttaccaccgtcggctgctccctcgagatcatatcgccgtatcatctgtatctgaatcccaagctcgtggtcaagcagtacgagatctggcgcctggtgacgaacttcttgtacttcaggaagatggatctggactttctttttcacatgtttttccttgctcgatactgcaaactactagaggaaaactccttcaggggaaggacagcagatttcttttacatgctgttatttggtgccactgttttgactggaattgttctaattggtgggatgataccatatgtg

SEQ ID NO: 2595 - DNA, 166 bp, Lilium asiatic
cccacatgcccccctctttatcccatctgcataccatcaggtataggacttcttcccaaaatggagggaacttgttaagaccaccggttggatccgtgaccactgggtccgccagcaccattttgcaggaaacattcgacagcaatgatcattcttaaaaaggatt

SEQ ID NO: 2596 - DNA, 336 bp, Lilium asiatic
  modified_base (291)..(291): a, c, g, t, unknown, or other
cggacgcgtgggagaagaagccggttgcgttataagcctgccgccgaggaggagaagaaagctgccccagccgagaagaagccggcggagaagaagcccaaggccgggaagaaggtcccggcctccaaggagggggagaagaagaagaagaggtcgaagaagtcggtcgagacctacaagatctacatcttcaaggtgctgaagcaggtccaccccgacatcgggatctccagcaaggccatggggatcatgaacagcttcatcaacgacctcttcgagaagatggctcangagtctgttcgtctcgcccgctacaacaagaagaataccatcacc

SEQ ID NO: 2597 - DNA, 396 bp, Lilium asiatic
gagacattagaaaaatgggttacttgtgtctttgctggccacacagctgtttgcttaaaagatgaaatgggtaatctgtgggttggggaatcaggccatgaaaatgagaagggagaggaaattgttgccgtaattccatgggatgaatggtgggaaatggctctaaaggattcttccaaccctcagatagctctgcttccgttgcatcctgacttacgcgcaaagtttaatgctactgcagcatgggcttatgctcgtagcatgataggacagccgtatggttatcacaacatgatatttagctggattgatacaattgctgagaactatccacctcctctggatgctaacctggttatgtccgtaatgtccatgtggactagattacaacctgct

SEQ ID NO: 2598 - DNA, 406 bp, Lilium asiatic
cggacgcgtgggtgcatttggtcagctttttatagatttgcttggcgagaattacaaattgcaactgatagttttagtgagaaaaacgttctcggacaaggaggttttgggaaggtatataaaggagtgctttcagataacacaaaaattgcggtaaagcgattgactgattatgaaagtcctggcggggaagcggcttttctacgtgaagtcgagttgattagtgtggctgttcacagaaatctgttaaggttgattggattttgtacaacaccctcggaacggcttctagtttatccatttatgcaaaacttgagtgttgcttatcgtttacgagattttaaacctgctgatcctgtcttagattggcctaaaaagaaacgaattgctttaggcacagcacgcg

SEQ ID NO: 2599 - DNA, 303 bp, Lilium asiatic
aggtcgcgttggagctttttacacacctttacttttcgaatactgtacttaccaaatcatgtcccatgactgatgaagagggcccatttctagagaaagcactttggacaaagattgtatggtattcatgcaagtgcttgacccagaatactatggtaaagaaccccaaaaagagaaatgtgaatacctttcccatcacaaaaacgataaaaagcgagagcttatataataatcttagccgtccggaagttcaccatgatgatgctaatattgtttaaaataaagccgccgagctgcaaaatc

SEQ ID NO: 2600 - DNA, 222 bp, Lilium asiatic
ccaaggtacgatgcaaggtagcaattcatgttattcgatccaatggaaatggtctaaaacatgctgtgctacagcatcttcgagtcgtaagtccagttgcacggcccacagtttttcgacgttttgagtctgcttcgcctgctcgtttggaagagcatggatttgaaagcatcacagtttcagacattctgaaagctaaaggcaaaggtgctgatggatcct

SEQ ID NO: 2601 - DNA, 316 bp, Lilium asiatic
agatcatactcatactgaagtccaagaaagagtcgagaaaactggcatacgatgtgcttctggagataactggtagtctgaagaattctaagcaagtcataggtgacacattacttctacggctatttaatatggtaatgggctatctttcaagcccatctcatcatataatgagtggggcaatttctgcactttcattgctcatacacaatgatgctagcttctgtcttacggtgccaaacctgataccatctgtcttagttctgttgcaaaataaggacaacgaaattataaaagcgtctttgggtttcatcaa

SEQ ID NO: 2602 - DNA, 329 bp, Lilium asiatic
cggacgcgtgggtggaacagattgtggatgttatttcatctgtgaaagaggaagcatttagcaggaaggaaattctcgaaagggttgagaaatggttggctgcatgtgaggaagagtcgtggcttgaggagtacaacagggatgtaaatcgttacactgctggaaggggtgcccaccttacactcaaacgtgctgaaaaagctcgtgctatggttagcatgattccaactattgtgggagcacttgccccgtaaattggagcatgggagagcgaaaggggtattgagttccgatatgatggtgttcgccttctgtcaatgggggaagag

SEQ ID NO: 2603 - DNA, 164 bp, Lilium asiatic
ggcttacactgttgctgtacgtcttgatatcaacattaatggtggcatgcaatttgcggactgggctaagttgaccggtgttcaatgatggcttacccaaggtccgagatacctgcttgtggtacatactaacatcaaaagtctcgtgctatgagagccccatg

SEQ ID NO: 2604 - DNA, 397 bp, Lilium asiatic
ccagtttctgtatcttgataaaatcttcttgttgcatctcatattccttatctggtgaaaaagttgtcagacagtgaaaacaagacgacacctatgttaggaaatgtaatagatgattcaccgtatcaaactttcattaagaaagatgcataaaatgaataatatgataagaagctggacaatgcttcagaagatagtcatctctcgctaagtgattacggaacagtcgttgtacggtctccaaaagaaacttctgtatatacagcattcagcaatcacgataaaaagcctgtccgcagatattctgaagatgtctctgttagtggcacagctgttcttcgtactgatcctgatgagcctgacactcctcgagcttcacaatacagattgggtctcc

SEQ ID NO: 2605 - DNA, 404 bp, Lilium asiatic
aaccactcctcaatcatgtcaggacgcggtttgggagggaaggggctcggcaagggcggcgccaagcgtcaccgcaaggtgctgcgggacaacatccagggcatcaccaagccggccatccgccgcctggctcgccggggcggagtgaagaggatcagcggcctcatctacgaggagaccagaggggtgctcaagatctttctggagaatgtcatccgcgatgctgtcacttacacagagcatgctaagaggaagacggtgacggcgatggatgtcgtctatgctctcaagcgtcagggccgcaccctctatggattcgggggttgatcttttcctgttcatctgggtctctgtttgtttttgaatttggatggtagtttgggttatgagtgtctgttgtttaa

SEQ ID NO: 2606 - DNA, 401 bp, Lilium asiatic
attgacgtagattttcattctgaggaagtttttggtgctgtactctgcctgattaggaatttcccaaatttagaagtgctcaatatacagatttctggtttgaaggttggagatagtactgcaaactcgttgaaatcaaagaactgtgatctcacattcactcgcctcaagacggtcaagatagctgacatgactggtacagagcaggagctgcatctaattaggtgcattcttatgactgcaccgttactagaaacactaacaatatgcatatatcatgacgaaaatgtctttcctgttatagacatccttacgagtttgatgcgttatccaagagcttcaacacaagcagagatcatttacacgcatgatttaattcttaatgtggattgagttcacta

SEQ ID NO: 2607 - DNA, 188 bp, Lilium asiatic
cccactcgtccggtttgttttcaaaatcatgtcttatggagaccggatccaatgcggggaagggctcctgctgacgcaggggcggtccaaaggctaaatcggtgagtcgttctgtataggccggactttattttcctgttggcaggattgggcggtacctcaagataggtcgatatgctcagcgtgtt

SEQ ID NO: 2608 - DNA, 396 bp, Lilium asiatic
gttcaatcaattctcattcagcgacttgttttggttgatggtaaagtccggaccgacaagacctaccctgccggcttcatggatgtcgtctctattccgaagacaaatgagaactaccgcctcctctttgacaccaagggtcgcttccgtctccactctataaaggatgaggagggaaagtttaagttgtgcaaggtgaggtctgtgcagtttgggcagaaaggcattccttacctgaacacctatgatggcaggaccattcgctacccagatcctctcatcaaggccaacgataccatcaagcttgatttggaaactaacaagattattgactttatcaaatttgatgtggggaatgtggtgatggttactggtgggaggaacactggacgagtt

SEQ ID NO: 2609 - DNA, 398 bp, Lilium asiatic
tcgggggctccctgttgattcgcggtttttctttttaccagagaagcacacattcgggggtgggccgaaacccaagttggattccaattcccagtaaatgctgcgccgtgtccctgtacgattgagatgcatcgaaagacaaaaacgatgctgagtcaacggcaaattatgtgctttactaaatggaccactctgaccctacgggaatggacccgtttggatcgggcctgaagaaagcctgtacaaaccattgcgaacagcaatcctaaccggcaggaagtggggtagaattgacaggccttgcttgaagaaagagctagcaacaattttgtaacatttttaaatagaaagttggtttattatattggaactaccgtttcaatgggaggacacatatg

SEQ ID NO: 2610 - DNA, 403 bp, Lilium asiatic
  modified_base (40)..(40): a, c, g, t, unknown, or other
gcataaccctaacccttgctgcgcagatttttgtttcggncacgatgagccgcagcgctggagccgccggagctaagggaggagccgccggagcgaagggagggaagaagaagggatcgaccttcacgatcgactgcgggaagccggtggaggacaagatcatggacatcgcctccctcgagaagttcctccaggagcggatcaaggtcggcggcggcaaggccggcgccttcggcgatgccgtcaccatcacccgcgagaagagcaagatcaccgtcacttcggatggccccttctctaagcgatatctgaagtacttgacaaagaaatacttgaagaaacataatgttcgtgactggctccgcgtgattgcgtccaacaaggatcgcaacatttacgagct

SEQ ID NO: 2611 - DNA, 403 bp, Lilium asiatic
ggttttgagtttcgacccacgcgtacggagggccccatctgaatagctcacctatgttcctttaaatctcagggccggccctgttaatcagtatttaaaggtacggcccaggcattaaaaaatcctgatatgtttcattttttgcagatgagattagaatctgcagactgggatacagaaagtgctgactttttattcagaaacttgagattaactggttttcacagtgcaattgaaaagattagcccgaaagaaaataagcaggtctttgttcgtgcatatcccaagaatattgatgctaatgtggaggagtattaccactttatgaccaaaaactcccatcccactctccttggagttcgcaattggtatgaagatgatcattaacatgttattttcgtcg

SEQ ID NO: 2612 - DNA, 412 bp, Lilium asiatic
tgggcttcttggtgtttcttggggttactgttttccagagaagcacacattcttcggtttgctgaaacccaagtttgattccagttcccgttaaatgctttgtagtttcgctgtaggattgagattcatcgaaagacaaaaactatcctgagtcaacggcaaattatgtgctttactaaatggaccatcctgaccctacgggaatggacccgtttggattgggcctgaagaaagcctgtacaaaccattgcgaccagcaatccgaaccggcaggaagtggggtagttttgacaggccttgcttgaagaaagagctagcaacaattttgtaacatttttaaatagaaggttgatttattatatcggagctacggtttcaatgggagtacacatatgtaaataaccaataaaac

SEQ ID NO: 2613 - DNA, 339 bp, Lilium asiatic
  modified_base (166)..(166): a, c, g, t, unknown, or other
ctttcccctcttcaaatctctcagatctgtaatggcacccaaggccgagaagaagcccgcggcggcggagaagaagccggccgaggaggagaagaaggcggtcccgacggagaagaaacctgctgagaagaagcccaaggctgggaagaagcccaaggctgggaanaagcttcctgcctccaaggagggagagaagaagaagaagaggtcgaagaagtcggtggagacctacaagatctacattttcaaggtgttgaagcaggtccaccctgacatcgggatctcgagcaaggcgatggggatcatgaacagcttcatcaacgatctctttgagaagat

SEQ ID NO: 2614 - DNA, 422 bp, Lilium asiatic
atcaatatctatattttttgtatatgattgtaaagaagttaagtctctgttttatgatttgttctgtatagatctaattgctccattccaatctattttttattcatagttgcaagttaacacgacataatagatcagcgaccgatatttgaagaaaggggggagaagatattatcaatcatgaaaaaatagatagataaaagccggctatcggaatcgaaccgatgaccatcgcattacaaatgcgatgctctaacctctgagctaagcgggctcacatagcagaaatagaaatagtgaatagggagtccagaaactaccagatttaatatattagctattaatttctttataattaatatttattatttttaaaattttaattcataggattaataattacttaataataatacttaaaa

SEQ ID NO: 2615 - DNA, 431 bp, Lilium asiatic
  modified_base (171)..(175): a, c, g, t, unknown, or other
ccccgatcaatatctatattttttgtatatgattttaaagaagttaagtctctgttttatgatgggttctgtatagatctaattgctccattccaatctattttttattcatagttgcaagttaacacgacataatagatcagcgaccgatatttgaagaaaggggggagnnnnnattatcaatcatgaaaaaatagatagataaaagccggctatcggaatcgaaccgatgaccatcgcattacaaatgcgatgctctaacctctgagctaagcgggctcacatagcagaaatagaaatagtgaatagggagttcttttttcttccagatttaatatattagctattaatttctttataaataatatttattatttctaaaattttaattcatagttttaataattacttaattataatactttaaaaga

SEQ ID NO: 2616 - DNA, 345 bp, Lilium asiatic
cgcacgcgtgagcggtcgccctgtctgttttcttgttcagacgcggggcctaaagtgattgacatgtgtaaacctattatgtgtgaatctttctgagctgcaaaagggtgggtgaccatcaggctcgatactcaacgaaaagaggacggatgcccgaacgagatacattcgtatacaaaaactgcatgaactaacatcttttaacagggaaactactacgtgaccctacacgaagtatgattgttatataagggctatccatggactctatgatcgaagccataaataacttgaatgtctctgacaattatcgtttgtgaaatggaacctacataaaatttgaca

SEQ ID NO: 2617 - DNA, 364 bp, Lilium asiatic
tcggaaaaaccggcgcgacccactcgtccgctagcgtttgacctttttgtctttttttctagacaaaggacaataattcggggtcgtgtggtgaaaaatggggtgagaaaaattttgtgctccaaaattgtcaattaacaatttggcgagatactaaatagaatacctacaatcgaatgaatctgctccattggtagatgaatactccatatccagaaatcttcaaatgtggtttcttctaggtgatcctacacgaagaatgatttttatatattggaaaacttaaatcgtttatcatagaaaagaaaatagtcaatatggcaatagtaaattatggtttgtcaagtttaaggaacataaattt

SEQ ID NO: 2618 - DNA, 293 bp, Lilium asiatic
  modified_base (171)..(172): a, c, g, t, unknown, or other
ggatcaatgcaccatttatatctttctactgtataaaatagcaaaacactggtactaaaggcaggcgaatcccccgaacaggcccccaaaagaggagaaatcttgcttgctgcagccctagaaattgacgatggcggaggagagcaggagaggaggcgtcgtatttttttnntcggcgaatgcctccggcgacgactggaagttgccagcaacggcggcgccggccagtaagaagatcgtgatgaagagcgccgacatgaaggaggatatgcagaaggaggccatcgattgcg

SEQ ID NO: 2619 - DNA, 429 bp, Lilium asiatic
  modified_base (165)..(165): a, c, g, t, unknown, or other
  modified_base (314)..(314): a, c, g, t, unknown, or other
  modified_base (316)..(316): a, c, g, t, unknown, or other
gaacaatgcaccatccagatctttctactgtataaaatagcaaaacactggtactaaaagcaggcgaatcccccgaacaggcccccaaaagaggagaaatcttgcttgctgcagccctagaaattgacgatggcggaggagagcaggagaggaggcgtcggcgcncccttttcggcgaaggcctccggcgacgactggaagttgccagcaacggcggcgccggccagtaagaagatcgtgatgaagagcgccgacatgaaggaggatatgcagaaggaggccatcgattgcgccatcgccgcgtttgagaagcncngtgtggagaaggacatcgccgagtatatcaagaaggagttcgacaagaatcatggacctacctggcactggattcgtcggcgcaacttcggatcatatgtgacacatgaaacg

SEQ ID NO: 2620 - DNA, 319 bp, Lilium asiatic
  modified_base (107)..(107): a, c, g, t, unknown, or other
  modified_base (180)..(182): a, c, g, t, unknown, or other
ggaacaatgcacgcatcttagatctttctattgtataacatatagcaaaacactcggtacctaaagagcaggcaggatccccttgaacagggcccccaaaagaggangaaatcttgcttgctgcagccctagaaattgacgatggcggaggagagcaggagaggaggcgtcggcgcaccnnntttttttaaggcctccggcgacgactggaagttgccagcaacggcggcgccggccagtaagaagatcgtgatgaagagcgccgacatgaatgaggatatgcagaaggaggccatcgattgcgccatcgccgcgtttg

SEQ ID NO: 2621 - DNA, 345 bp, Lilium asiatic
gagtagatctaccattaagcctgtcttttacgcttttccagaaaagaaaggggattgggcgcacagtcacaccattgggcggaaacaatatgttgggtttgtaccaatgtcctggtaatctgaccaatgatcgtccatatggtgagcatggaagcaaaaattttgtgcggttctgtacaaagtagttccacttgtcatgcctggttgatgcaacgaggagctatttccatgtgaggttttcaaggaacaaatcgtgaagcctaatctaaagcatgacttccattctgtttgcaaagttaagcttgaattggcagaattaacagagccctcttacacttcgtgtaa

SEQ ID NO: 2622 - DNA, 411 bp, Lilium asiatic
ctttcatgggagggctcgagtaccccgttttcagaaccaccactgcttcatggattgtatccttttgacggagaaggtgtaactagggttgatggctctggtcggttttccgggcagataaacccaaaccctaacagcactattctgacaacgagctcccaagggctcattacacagatggcctcagtgaagatggaagacagctcccaagggcttaatctgtcaaggcagtacttcggtcttcctaggagtgatcagtattggaacggtggcggtggcagtggaggcggtggtggcagtggaggtggatggatgatggatctcaccggttttaactctacctcttctggaaatctcttgtagttagaagctcagtttttcaatggcttccaatggttctggttaaatggg

SEQ ID NO: 2623 - DNA, 416 bp, Lilium asiatic
cttttgaatcaatttaatgtcatggaccatcatggaacaaagatcattgtttttaatctgtggttcaatgatgacgctggaatggagcttgattttgaatctgatccgaaggatatcatgattaatagcgcggacagacatgtaccgaagaagagtattgagcatatacttagtcataaatatgttgctaatcgtctccatttttctctcagagagtactcgtctgtcctatacctccgtctaccggaaaattttaagatcatcttgcgtgggcaagtagtaaaacaccaccacattgctaatgatctaaaataccgtgaatgcatcaagtacagaccacaagttgtgggaattgctgagcctgaggtgttcaccaccattggatatctgaaaggagctccaaatgttaatgttca

SEQ ID NO: 2624 - DNA, 336 bp, Lilium asiatic
ctgacgcttgagcgctgtgtctttgcattctgaaggcgcaaaaatccttgaggctgaagggcgatgaactcatgaactgggcccgtcgaggatctctttggcccatgaccttggggctcacctgcattgctgggaaaaacatgcatactggtgctgtacggaacaatctgtatcgcataggggttatctttcgcccgagccttagtctgtccgattgcattatcgtggacgagacgctgacatacaagatggtttcacgaatcttcacagggtgtttaaccaaatgcccagcccactctgtgtgatatccatgggcacgtgcctaatggtggggga

SEQ ID NO: 2625 - DNA, 296 bp, Lilium asiatic
gaacaatgcaccatccagatctttctactgtataaaatagcaaaacactggtactaaaagcaggcaaatcccccgaacaggcccccaaaagaggagaaatcttgcttgctgcagccctagaaattgacgatggcggaggaaagcaggagaggaggcgtcggctcaccctcgtcggcgaaggcctccggcgacgactggaagttgccagcaacggcggcgccggccagtaagaagatcgtgatgaagagcgcccacatgaaggaggatatgcagaaggaggccatcgattgcgccat

SEQ ID NO: 2626 - DNA, 393 bp, Lilium asiatic
ggggaatgatgccacaaatattacttttactacttctgcagtgcctcaaaatctaaaagttcaaaccagaaatgaagacaaagccaatgaaaataactataatgatctctcagggaagtgcaaagatgctaataccaagtctgctcagctggaaacggagggaagaagtcatcttattaatgttgaaataacatcggttaagcggaaagagctctactttgattctgctggttctgctgttaacctggatttggaaaatgtaaataatgctcttcaggctggtgtaacttggttagagcagaaacattgtggaggtagtttgcttagcgaattaaggggaatgcttcatgagttcaacctgctctctctgagcaagaagggaatagatgagtc

SEQ ID NO: 2627 - DNA, 422 bp, Lilium asiatic
  modified_base (166)..(166): a, c, g, t, unknown, or other
ctgttatggtggcgacgaggaaacaaggaagtccaactacagtgatatggtaaacaaatactatgatcttgcgaccagcttctatgaattcggctggggagagtcttttcactttgctcccaggtggaaaggggagtcattacgtgaaagtatcaagagacatgancacttccttgccttgcaactaggcctgaaaaggggaatgaaggtgttggacgttggatgtggaattggtgggccactccgagaaattgctagattcagctcaacatctgttactggattgaacaacaatgagtatcaaataacgagaggaactgagctaaacaaattggcaggattgactgagtcatgcaactttgttaaggctgatttcatgaagatgccattcccagatcatacttatgatgccatatatgcta

SEQ ID NO: 2628 - DNA, 410 bp, Lilium asiatic
  modified_base (169)..(169): a, c, g, t, unknown, or other
  modified_base (171)..(172): a, c, g, t, unknown, or other
  modified_base (317)..(318): a, c, g, t, unknown, or other
  modified_base (322)..(322): a, c, g, t, unknown, or other
ctgttatggtggcgacgaggaaacaagtgtagtccaactacagtgatatggtaaacaaatgctatgatcttgcgaccagcttctatgaattcggctggggagagtcttttcactttgctcccaggtggaaaggggagtcattacgtgaaagtatcaagagacatgagcncnntcttgccttgcaactaggcctgaaaaggggaatgaaggtgttggacgttggatgtggaattggtgggccactccgagaaattgctagattcagctcaacatctgttactggattgaacaacaatgagtatcaaataacgagaggnncttngctaaacaaattggcaggattgactgagtcatgcaactttgttaaggctgatttcatgaagatgccattcccagatcatacttatgat

SEQ ID NO: 2629 - DNA, 423 bp, Lilium asiatic
aatttgtgcaagtcagttctggggtctgttagttcgacaggtaggtgattctcataactgccttgatgatgcacaagccacaatgaagttggttcttgctaagctggagcatggattcaatgatcccatttccattgaaagcaaagctgtcagtacctctgatttagcaaagcttctactacacaaaatacgtagcggcacaacccttgaagaactgccaagaatatttccttctggatatgatgttgacattcagactgatataagagttaaagggcagacttattccacgtttgctgttttcaaagatgccagtgaggcagatgaagcatttagaggagttgaaggccaacaaagccaggactctagtggaaagctacaaaaacgagttcttctgaggcttaatacaggagagaggattag

SEQ ID NO: 2630 - DNA, 412 bp, Lilium asiatic
atctcgtccagatttgatcttgacagtttataaagaaaatgcagaatttgctcttggcatgtgtccggcggatccctttgtcctttctggaggcaaggacaagttagttgtcttgtggagcattcatgaccatatctctgcattaggagaggcctctaaatctcctgcggcttcatctggtggatctggaggcaagcaggcaaaagctggaagtgataaaagttctgagagcaccaaagttgcagcgcggggtgtgtttcaagggcataccgataccgtcgaagatgtgcagttcgctccctctagttcgcaggaattttgtagcgtaagtgatgatgcttgtattattctttgggatgctcgtgttggttcaagcccagttgtgaaggttgagaaagcccataattctgat

SEQ ID NO: 2631 - DNA, 424 bp, Lilium asiatic
  modified_base (18)..(18): a, c, g, t, unknown, or other
accacgcgagcgagcagncgaggagattcgagcattatttttaccgttcgcgagagagaagcaagcagcggccatggggtgcctcaaccggtccaccaacgaccccctcgacgatgtcgacacgtccgccatcctttccgaggccagcaagaccgtcgccaagctcatcggctagcccgaagcctatgtgatggtagtgctcaaaggatcggtaccaatgtcgttaggagggactgaacagccaactgcttacggggaactgctcttcatatgagggctgaatcctgatgtgaacaagaaactgatggccgcacttgcttcaattctggaggccacgttgaacattaccaagacgcgcttttttcttaagttctacgatacaaagggttcaaacaacgggtggaatggatctactttctaggtc

SEQ ID NO: 2632 - DNA, 388 bp, Lilium asiatic
  modified_base (51)..(51): a, c, g, t, unknown, or other
gagctggagggcatctgcaaccctatcattgctaagtagtacctgtgcggngctggtccagatatgggtggtatggatgaggatgatgatgttcctactggaggcagcaatgctggtcccaagatcgaggaggtcgactaagtttcttttataatgctttttttaggtaactgaaagtatttccttggctatcttgcctttgactgcttttgatggtgaacaccttacctgttatgtttaactactttatggctacattagtagtctttttgggtttacccaaacacgtgaaaaagtacaaatcaattccctttatttagaagaaattttttactgaaggttaaaaatctttgtctattttttgggaaaccctccttttttttaaaac

SEQ ID NO: 2633 - DNA, 234 bp, Lilium asiatic
atgatattgagcggatgattttttacttttgcgagagaaaagtaagaagtggctatgtggtgcataaaccacaataacgacgtttctttctacagatgtgagacacgtatttcaatgattttcataggcattgaaaacaaagctcaaactcattgtgaattacgaaacctatttgtcacaaatgacatagggagccaacccatgaagaactgagaagaatattactcattgata

SEQ ID NO: 2634 - DNA, 399 bp, Lilium asiatic
aggaattgcgggttatttatcatttgggagaggagactaggagctgtgatggcggggtgaacgtatttgatacccttgacaactgggtgaagagtttcttaatcaggctaggggtcttgatcacaagactttacatttgttctacttggaaacatattgaatacatggtggcaacagcagacgatcttgagaagaaagatggagaatgctgtgctttcaagggcagtataccttactttgaaacttcatcataagaggactataatgctgatgctgctttcttatgtgctgctgaacttgcactagcgaatgatcatgaacaagatatttactaccagaccataccagaacctgttaaacaagcagagcaagagagatgatgcttagcttgttgattta

SEQ ID NO: 2635 - DNA, 393 bp, Lilium asiatic
  modified_base (165)..(167): a, c, g, t, unknown, or other
  modified_base (314)..(318): a, c, g, t, unknown, or other
aagaaaccttatacttcttttcctcctttacaacaacctagcaagattgaccttcaatgggcaactggtgaatatttcctgagtaacaaaagtcaatcagccaaagaatggcaaaagaagcacgaaaagcaggcagaaaagacagctgaaaacaagagaaaaagnnnggctgctttcattccacccaaggaaatcgtgagcaacccctctgattctacaaaatctggaaatgacaaaaatgagatgactgatgtggcaatgtctttgaagaaaaatgtgaaagagttaaaaaatcacgtcgcacatggaaatannnnngcagaatcatacattgtcgatgcatagaagctttcttctaaaaagaagtccaagtcttcaaagactaattaatta

SEQ ID NO: 2636 - DNA, 363 bp, Lilium asiatic
  modified_base (10)..(12): a, c, g, t, unknown, or other
  modified_base (180)..(180): a, c, g, t, unknown, or other
  modified_base (182)..(185): a, c, g, t, unknown, or other
  modified_base (329)..(330): a, c, g, t, unknown, or other
acccacgcgnnncggttgtgtggtatattccagatctgtttttgtataatgatatgattttcatgttgggagggaacatgcacattgaatacgctgagcaagttttctcagaaataaagaaagtgggcttgctacctgatactaggacttatactgaaatgataggagcctatattcttntnnnnttggtggagaaagcaatggatatgtacaggctgatgaaagaatcaggttgcaatccagacaggctgactttaactgttctaattaagaaccttgagaaggctggagaggaagaccttgcgtctgctgttaggaaagattgttgnngttgtattgattttcctaaaaaaattcttaaaa

SEQ ID NO: 2637 - DNA, 382 bp, Lilium asiatic
atttgctgtcactagcactacagtcggtcaagtgcccggcgtcgaagaagagcagtacaagccaaatctggcgctgcccacacagaaattaaagaaagccaaggggaagacagttactgtgaagaaggaaagcgggtatgacagtacttcaagggctgcgactcctacttacccttgcaagaagaccgatggcaagcaatggcagtgcaggcggccggcgcacaaaccaaattcattgtgcgactaccacctcgcacagaacaagtcctacagctacaaagccctttcggttgctcaggcggctagcgtccacacaagtattcaaaagaagaggatgacaaggccgcctgctacatctgccgtttcggaaatctattactac

SEQ ID NO: 2638 - DNA, 332 bp, Lilium asiatic
cctcattccacctacagctctcttctctctctggttttcagaactatgataaagctttttaaaataaaggaccataagagggaagatgctggcaatgctgctggaagaggtcctataaagaagcaaagtccaggggaattgcgtgttcaaaaagatattggtgagtcgaacctacctaaaactactaccataacatttcccaatggcaaggatgatcttatgaactttgaaatcatcattcggcccgatgaaggatattatctaggtggcacatttacttttacttttcaagtctcaccttcctatcctcacgaaccaccttaaggtgaagt

SEQ ID NO: 2639 - DNA, 396 bp, Lilium asiatic
  modified_base (10)..(10): a, c, g, t, unknown, or other
acctcatttngaacttagagagagagttttagagatctgaagagatggaatctggaaagatagccaagggtgctgccggccgcaagggcggctcaaggaagaagtcggtcccaagatccatcaaggctggacttcacttacctgtcggccgcatcggccgctacctcaagaagggccgctatgcaaagcgtgtaggttccggagctcctgtctaccttgccgccgtgctcgagtaccttgctgctgaggtgctggagctggctggcaatgctgccaaggacaataagaagcctcggatcgttccgaggcacgtctgccttgctgtgaggaacgaccaggagctgggcaagctgctcgctggagtcaccatctcccatggcggcgtcattcccaaca

SEQ ID NO: 2640 - DNA, 268 bp, Lilium asiatic
  modified_base (21)..(21): a, c, g, t, unknown, or other
acccacgcgtccgccttcacntttcccttcacgacttagatcgcgagttttaacgccacgagcaacaacacgggccatctggaacgtataaggggctcttgtccatctcaatcgccaaaaaggtcttcttcttctgcaactgcaaatgcactcttaccaacgtggaggtgcaaaataacatagaaatgctctatttaacatacgtttccctgcgctatttaatgtacaccatcggtaccccctcaaataaagatacttactttgaccc

SEQ ID NO: 2641 - DNA, 403 bp, Lilium asiatic
  modified_base (41)..(41): a, c, g, t, unknown, or other
gttgaacaactattataagttgtgtattagttttccaacancaaagaagcgtggcggatgatggataaagagagccaatttggtgtacaagtacatgctaaatatgccgaaatggaagatctaaggagacaggaagaatcttgacaacataggatcactaaagctaaagaggatcttgttgcagctgaaagggagcttgcaaatcttccagtttacgagccttcaaaagatgaaatagagaaattaggagctgacatattggatttaaatgttaatgcaaatcacatacgattacaaaggacagaaaatgaaaacatcttgaaccataagaagctctccctgaggaagtgctcagataggttgaaggaactggaggataataatatcaaaactcttgatgcat

SEQ ID NO: 2642 - DNA, 389 bp, Lilium asiatic
  modified_base (45)..(45): a, c, g, t, unknown, or other
ctttatttcacctctttcttttttctgtctatggcccgcagaacnaagatggagctgggtaaaatatagggccataagagggaagatgctggcaatgctgctggaagaggtcctataaagaagcaaagtccaggggaattgcgtgttcaaaaagatattgatgagttgaacctacctaaaactactaccataacatttcccaatggcaaggatgatcttatgaactttgaaatcagcattcgaccccatgaaggatattatctaggtggcacatttacttttacttttcaagtctccccttcctatcctcacgagccacctaaagtgaagtgcaagacaaaggtttatcatactaatattgacttggaaggaaatgtctgtttgaacat

SEQ ID NO: 2643 - DNA, 309 bp, Lilium asiatic
tggcaaagctgctggaaaaggtcctataaggaagcatagtccaggggaatggcgtgctcaaaaagatattgaagagatgaacctatctaaaacatactaccattacatccctccaatggtaaggatgaccgaacgaactctgaattcatcgtgcgggcctaccatggatttgtaactagttggaacgagaacatttaacttttgaagcctaccctgacaatccttacgagccatctaaagagaactgcaagacagggggttattatcctaatattgactttgaggtaaatgtctgattgcacattttgc

SEQ ID NO: 2644 - DNA, 238 bp, Lilium asiatic
ttttactttacctccttcgtctttcgttctatggcccgcagaactatcagggcacttggaaaactaaagggcctcatcttgatatatactggcaaagctgtttttataggtgctatactggaaatacagtggggccaatgacgaggtgaaaaagatcattgggatgctgaattcacttgaggttctctcatagcatgttctaggggctaggatgtatcccttcatctgtgaaattatc

SEQ ID NO: 2645 - DNA, 417 bp, Lilium asiatic
cccacgcgtccgcccacgcgtccgcggacgcgtggggaatcgcctgatctagtctcgtcccatccagatcacagagcttcatcgtcttcatcgagatggccagaaagttcttcgtcggcggcaactggaaatgcaatgggaccagcgaggaggtgaagaagatcatcgggatgctgaattcagctgaggttccctcgggggatgttgtggaggttgtggttagccctccatatgtgtttcttcctttgacccaaagtttgctgcgttctgatttccatgttgctgcacaaaattgctgggtgaagaaaggaggtgccttcactggtgaaatcagtgctgaaatgcttgtaaaccttggtattccctgggtcattcttggtcactctgaacgaagggctttgctaggcgaatcaaatg

SEQ ID NO: 2646 - DNA, 287 bp, Lilium asiatic
  modified_base (169)..(172): a, c, g, t, unknown, or other
caccgatctatatagatcgtttgcgcaccgctgttttaggttgtgtttaccctacatacatgggcacccttttagatctcaacgtgcaaatgcgaactttactgcctgaccggctggtataggttcactacaaatacgagctgatggaataaaccttgcttctcactannnnccacattgaccgcttcttagcacgccaaacaatactgaagaagaagctgcaattggtaccgactcactggactgctacttgcttgcaagcatgaagaagtcttgatccctgctat

SEQ ID NO: 2647 - DNA, 388 bp, Lilium asiatic
cccacgcgtccgccctcgcgacctcggttgcgtggtgaatcgcctgatctagtctcgggccatccggatcacagagcgggatcgtgttcatcgagatggccagaaagttcttcgtcggcggcaactggaaatgcaatgggaccagcgaggaggtgaagaagatcatcgggatgctgaattcagctgaggttccctcgggggatgttgtggaggttgtggttagccctccatatgtgtttctttctttgacccaaagtttgctgcgttctgatttccatgttgctgcacaaaaatgctgggtgaagaaaggaggtgcccttcactggtgaaatcagggctgaaatgcttggtaacctttggtattcctgtgtcattcttggccactttg

SEQ ID NO: 2648 - DNA, 446 bp, Lilium asiatic
  modified_base (5)..(5): a, c, g, t, unknown, or other
  modified_base (48)..(48): a, c, g, t, unknown, or other
  modified_base (75)..(75): a, c, g, t, unknown, or other
  modified_base (80)..(80): a, c, g, t, unknown, or other
  modified_base (122)..(122): a, c, g, t, unknown, or other
ggaanattgggcggacccacgcgtccgcccacgcgtccgccctcgcgnccttggttgcttggttaatcgcccganctagnctcgggccatccggatcgcatagctgggtcctcttcatccanatggccagaaagttcttcgtcggcggcaactggaaatgcaatgggaccagcgaggaggtgaagaagatcatcgggatgctgaattcagctgaggttccctcgggggatgttgtggaggttgtggatagccctccatatgtgtttcttcctttgacccaaagtttgctgcgttctgatttccatgttgctgcacaaaattgctgtgtgaagaaaggaggtgcctttactggtgaaatcagtgcttgaatgcttggaaaccttggtattccctgggtctttcttggtcactctgaacgaatggctttgtttgcgaatcaaatgatt

SEQ ID NO: 2649 - DNA, 188 bp, Lilium asiatic
cggacgcgtgggggttgtagtcgtatttcgttagatgatatgtatttttttttatctggttgagttgtagtaagttagattttcattctctttcgtgttttagctttcgattttgtctgtaataatgattctcgttctagttcttctgtactcaaacttttatttctaatacaagtgttattattatt

SEQ ID NO: 2650 - DNA, 415 bp, Lilium asiatic
ctcaagtatccgccatctgtcccctcatacaagctctctcatgtctacactgcaatactgaaaccagataatgagttgcttattttaattgatggggaagagaaaaagaaagtgaacttcttgtcctctgatgattttgacccggcccttatcccttccaagacgattcctgatcctgatgataagaagcccgaggactgggatgagagggcaaaaattccggaccctgttgcggtgaaacctgatgactgggatgaagaagctcccatggaaatcgaagatacagaggctgttaagcctgaaggatggttggatgatgagccagaggaaattgatgatcctgaagccaccaagccagaagattgggatgatgaagaggatggagaatgggaggctcctaagattgacaacccaa

SEQ ID NO: 2651 - DNA, 387 bp, Lilium asiatic
  modified_base (168)..(168): a, c, g, t, unknown, or other
  modified_base (315)..(316): a, c, g, t, unknown, or other
  modified_base (369)..(369): a, c, g, t, unknown, or other
gcgatctataggttttttttacgcatcgatgttttaggttgtgtttcccctaattacatggccacccaggtcgatatcaacgagaaaatgcggggtatcctgattgactggctgatagaggttcactacaaatttgagctgatggaagagaccttgtttctcactgtnaacatcattgaccgtttcttagcacgccaaacagtagtgaggaagaagctccaattggtcggagtcactgcactgctacttgcttgcaagtatgaagaagtatcgatccctgttatagatgatttaatcgtaatctcagaccgagcnnatacaaaggctgagggtctcgaaatggagaaactgattgtcaatacattacancttaacatgtctgtgcct

SEQ ID NO: 2652 - DNA, 414 bp, Lilium asiatic
  modified_base (56)..(56): a, c, g, t, unknown, or other
  modified_base (70)..(70): a, c, g, t, unknown, or other
cggacccacgcgtccgatgtacaagtctggctttgaacgtaggttattatttctanagcccaagaggcgnacaggtgcacgggtgaagatgaagagcataagaataactttgatgccaataatgctcttgagaactactcctacaacatgaggaacaccattaaggatgacaagattgcgtccaagctaccggctgatgacaagaagaatattgaggatgcaattgagcaggcaattcattgtcttgaggccaaccatcttgctgaggctgatgagtttgaagataagatgaaggagctggagggcatctgcaaccctatcattgctaatatgtaccaaggtggtgctggtccaaatatgggtggtatggatgaggatgatgatgttcctactggatgaagcggtgctggtccc

SEQ ID NO: 2653 - DNA, 334 bp, Lilium asiatic
  modified_base (167)..(168): a, c, g, t, unknown, or other
  modified_base (172)..(172): a, c, g, t, unknown, or other
  modified_base (316)..(319): a, c, g, t, unknown, or other
gaggcgaagcgtgtcaataaacaagctctacaagcagaagttggcttgcctgtagacccagacattccagtgatagtcttcgtaggaaggctagaggagcagaaaggctcagacattctcgctgcagcaattccagatttcattgatgagaatgtgcagataataannctcngaaccggcaagaaaatctttgaaaaacaggtcgaagaaatagaagagaagtacccggacaaggcgagaggaattgcgaaattcaatattcccttagctcatatgatgatggctggaggtgatcttatcatagctcctagtaaannnnagccatgtgggctta

SEQ ID NO: 2654 - DNA, 427 bp, Lilium asiatic
  modified_base (166)..(167): a, c, g, t, unknown, or other
  modified_base (169)..(169): a, c, g, t, unknown, or other
gtttttattcatttagtggggataaccttatgataaatagaaagaactcgcgttgtaggacagaaattaaagctttagctcaacataaacatatatgtatgtcggttttcaaagcacgaagagtaattgatcagattcgtggacactcctatgaagaagcacttannanactagaacttatgccttatcgagcatcttatcccattttgaaattagttttttccgcggcagcaaatgctagtaataacatgggcttaaacaaagcttatttatttattagtaaagctgaagttaacacaggtactattgtggaaaaattaagaccccgggctcgaggacgtagttatccgataaaaagacctacttgtcatataacaattatattgagggataaaactaaattatttaaagatgaatcttaactttc

SEQ ID NO: 2655 - DNA, 421 bp, Lilium asiatic
  modified_base (168)..(168): a, c, g, t, unknown, or other
  modified_base (172)..(172): a, c, g, t, unknown, or other
  modified_base (316)..(316): a, c, g, t, unknown, or other
  modified_base (318)..(318): a, c, g, t, unknown, or other
  modified_base (320)..(320): a, c, g, t, unknown, or other
gctatgttctgagaaagagaagctagatttcgaggttgccgaattgagaaaggccacaccgaagtctctgtggatcaaggatctcgatgcattcgaaactgtttttgatgagcatgagcagaaagccgaggatgcgaggaatgagattaaagtgaagggcaggggggngagnaccgctgccaagcctgcaccaaagaagccacgaaagatcaacttcaacaagccagccactgaaccccctgctgaatcagatgctgctccagcggcaaaaccgaatgccgcccagaagaaagctcctgctaagaagactgttgtngncnaaagtgacgatgaagatgacgaaatactcgatcttaaggatcgactggctgcatacaacattgatgattcgttctcagatcaggctgatgtgatggaaact

SEQ ID NO: 2656 - DNA, 405 bp, Lilium asiatic
atgacaagggcaggctcagcaaggaggttatagatatgatggttcaagaggcggagaagtacaagtctgaagatgaagagcataagaagaaggttgaggcgaagaatgctcttgagaactactcctacaacatgaggaacaccattaaggatgacaagattgcgtccaagctaccggctgatgacaagaagaagattgaggatgcaattgagcaggcaattcagtggcttgaggccaaccagcttgctgaggctgatgagtttgaagataagatgaaggagctggagggcatctgcaaccctatcattgctaagatgtaccagggtggtgctggtccagatatgggtggtatggatgaggatgatgatgttcctactggaggaagcggtgctggtcccaagatcg

SEQ ID NO: 2657 - DNA, 397 bp, Lilium asiatic
ctgacgcgtggggttttacaggaaaatttttgcacttaggttactgtttgataagagtgccaatgatgaacatgagagaagtattttaaccaagctaaagcaacaatgtggagggcagttcacctcaaagatggagggaatggtgactgatctaacactggctagagaacatcaaacgagctttgaggagtatcttaacatgaacccacatgcacatcctggaatcgacctaactgtcactgtcctaactactggattctggccaagttataaatcttttgatctcaaccttcctgtggagatggtaaaatgcgtggaagttttcagggatttctatcagacaaaaacaaagcacagaaagcttacatggatatactcattgggtacctgtaatatc

SEQ ID NO: 2658 - DNA, 397 bp, Lilium asiatic
  modified_base (6)..(6): a, c, g, t, unknown, or other
cggaangaccgacccgacccacgcctacggctaggcttagcgattggttatctgatcataggccaagaagcggagaagggccacggcgaagattaagagcatcagaggactctttacgctaaaaacgctctttagaactactcctacaacatgaggaacaccattaaggatgacaagattgcatccaagctaccggctgatgacaagaaaaacattgaggatgcaattgagcaggcaattcagtggcttgaggccaaccaacttgctgaggctgatgagtttgaagataagatgaaagagctggagggcatctgcaaccctatcattgctaagatgtaccaaggtggtgctggtccagatatgggcggtatagatgaggataatgatcttcctactg

SEQ ID NO: 2659 - DNA, 416 bp, Lilium asiatic
agcaaagggacggaagcctatttcgtcttttcaggtgactgatactgaagagtattctcaaaatgacagtgataaggaaactccgccggtgcctagtaagatagttggtcataataaggaaactggtagttcaaaacttgatagcccatgtgctatggaaactgaatcaacagaatctcttgaacccgaggaggaaactgatttacaacccctccatagctctgataatggcagtccctatccctcttctccgacacccagtgaagatgttcctggcacaaaaaaatctaaaagaggaaggcctcttagttccaagatttcttctaagagacgtgttgctaatacagtagctgtccaacctgctacttctgaagaaaaaggtactgtacaggatgatgagatccaggatgatttac

SEQ ID NO: 2660 - DNA, 415 bp, Lilium asiatic
  modified_base (366)..(366): a, c, g, t, unknown, or other
cgaagagcaagattacaggctcaattttctcaaatgcgtccagttgcgatgccttctcctgttgcgcctcgtgtgccaatgtatccttccggtgctccgggaattggtcagcagctattttatggccaagcacctcctgctattataccaccccagcctggatttggctaccagcagcagctggttcccggaatgaggcctggagctgctcccatgccaaacttttttgtgccatttgtccagcaaggtcaacaagcccaaaggccaggtggtaggcgcactggacctggacctgtgcagcagactcagcatcctgtccccatgtttcctcaacagatggtgccaagggcacgcatgtaccgcttnccaccaggccgcaacatggccgaggccccattccttgatatgctggtgg

SEQ ID NO: 2661 - DNA, 356 bp, Lilium asiatic
gtttttattcatttagtggggataaccttatgataaatagaaagaactcgcgttgtagtacagaaattaaagctttagctcaacataaacatatatgtatgtcggttttcaaagcacgaagagtaattgatcagattcgtggacactcctatgaagaagcacttatgatactagaacttatgccttatcgagcatcttatcccattttgaaattagttttttccgcggcagcaaatgctagtaataacatgggcttaaacaaagcttatttatttattagtaaagctgaagttaacacaggtactattgtgaaaaaattaagaccccgggctcgaggacgtagttatccgataaaa

SEQ ID NO: 2662 - DNA, 335 bp, Lilium asiatic
accgacgcgtccaatgtacaagggcaaatttaccgatgcggttttagatttttaaggcgcacgaggcggagaaggactcgggtgatgataaagagcatgaaactacggctgtggctaataatattcttgggaactattcctacaccgtgaggaaaaaacttgatgatgactgtactgtggaaactgtattcacttgatgtcttgaacaccatggaggaactgatttaccacgccctcataggtcttgtggtggaacagcttattcatgttgttcaacatccagataagatgtacgtggcgcagaaaatttttaaaacaggaaagtcttttaattt

SEQ ID NO: 2663 - DNA, 422 bp, Lilium asiatic
  modified_base (159)..(159): a, c, g, t, unknown, or other
  modified_base (161)..(161): a, c, g, t, unknown, or other
  modified_base (307)..(309): a, c, g, t, unknown, or other
ccctctcgttactccgagatttcccttcattaggactctgagaagcccccgggttctggcattttaacatacggcttgtccgctgggctgtggactatcgggtttctggagacgagctatctgacttacttgaagctcactggctctgaagtcttttgncnttgggtcggagggagctgcagcgatgtactcaacagcgattactcctatgtttttggtgttcctcttacattagttggtatggtcgcatatgggttagatgctgtacttgctcttcaacagactgtgaagaatttactttgaggannnaaataaaatgatttttgaacaattttacttgtaacaaccactgcaatggcaacatcaagtgcttattttgtttatgttttgagcacaaaattagctggagcttcttgttatac

SEQ ID NO: 2664 - DNA, 381 bp, Lilium asiatic
gcagtgacctcgacgtcggtgtacccgttatctttactccggcgaacactgacgacaatgttgtccagtacttgaatgatgtaagcattaagttccatgcccccaccatctgtactctatcgacagtctggcggctggccaaggccgacgacaatactgggaagcgctttgtgaccatcgggggagttcccggcaaagagaacacttggttcaagatccagaaaacaggcaagtatgcatacaagctggtgtactgcccaagtgacgagaatgcctgcagcgatttaggcatttactacgacaaggaggccgggaagaggtggcttgctttgagcgactcgccattggaggttatgttcgtcaaacactgatcgtcactac

SEQ ID NO: 2665 - DNA, 395 bp, Lilium asiatic
tgctgatgctgtttccactagcagaagttctcttataggtgcaaagatccctgaaagtgattacactaccctaccaaatggtctgaagtattatgatttaaaggttggaggaggggctgaagctgtgaagggatctcgtgttgcggtacattatgttgctaaatggaggggggttactttcatgactagtaggcaaggacttggtgttactggtggaacgccctacggttttgatgttggtcaatcagagagaggaattgttcttaaaggattagatttgggggtccaaggaatgaaagtgggaggccagagattgttgatagttcctcccgagctagcttatgggaataaaagagtccaagagatttcttccaatgcaacaaatgagtttgacg

SEQ ID NO: 2666 - DNA, 412 bp, Lilium asiatic
ctgatgttgctgttatagacatatcatttagtgctgccatgaattaccagcaaattggcctaccggcaactcatgatgttgcatctcgtaatgacactgcttcggaaggtgaagatagggcaccaccaccacctgctaatggagatccaactcccattgtgtccttaccaaagaaactaccattccgtaaaacctcagttttatggggagaagttgagtcattggaagtctttcggtctattccacaagacccacatttctgcctagtggagaagcagtccggtaaggacttttgtgaagggatggctataggcttgatggttaccttcgacaaccttgttaaggatatcaggaagttggatgtgactgattcaaaccaggcattcgaggaaaggctgggaagccttaaaat

SEQ ID NO: 2667 - DNA, 201 bp, Lilium asiatic
catcataggatgttgtggacttgcacgcttcacccgcgttaacttgacaggtattaacactgcaatgatatcaaaccttgcatttgcattaacaaatattcttggacagaaagggtttcggaataataataaagtgtaagtaacaactgaccactactatggctttcttaccttgtcattcatacaagttatagtaccatt

SEQ ID NO: 2668 - DNA, 287 bp, Lilium asiatic
  modified_base (23)..(23): a, c, g, t, unknown, or other
  modified_base (25)..(26): a, c, g, t, unknown, or other
  modified_base (194)..(196): a, c, g, t, unknown, or other
  modified_base (198)..(198): a, c, g, t, unknown, or other
aataccggcccgacccacgcgtncnnttcaagagtgacattgatggcgggtctacacaatcttggagcaatgacaaacgcgccgaatgttccaacgccaacaggcgtgaccaccgccctgacaactccagctctgactagccctcattgcaagctcgtgccttgtcacttaactacaccgactgcacacgagcnnncnacgacttaaccatggataatatcaccttctctcattgctatcaatctgtctctaccgatcactccatctcactaacagaagcccattat

SEQ ID NO: 2669 - DNA, 428 bp, Lilium asiatic
  modified_base (170)..(170): a, c, g, t, unknown, or other
  modified_base (317)..(318): a, c, g, t, unknown, or other
  modified_base (320)..(320): a, c, g, t, unknown, or other
aataaaatactgagctggaaggagggtatatagccattgagtatcaatgaatttctgagggcagctgatggagaacggtgcgtttggtgggcgtggccgtagaaggggccgaggtgatcgtgcaccattcagaggtggttttgctggtggagcgacgtcaaactcttttncctcttcattaattgaagaccctggtcagctccccactcttggtgggaagtatagcgatcgtgcgccaaactgtgtttcttgtctctgatttaatttagtctcttattaatttaatacacgtaatgtctggattcggcacaatttcnntntttattttctttggattgatgtctcgtgtttttttcaaagtgtaatggtactatttgcatagtacctaaatacattttgtaagttaaatgtgtttcgatttttatgtt

SEQ ID NO: 2670 - DNA, 394 bp, Lilium asiatic
cggacgcgtgggctgctgtctatcttgttaggcgttttgtcgttcggcgtcgagtcgttccctatgcctgtctatctctcgctgcttcccatcatagcaggttgtggtcttgcagtcttctccggtgttaacttgacaggttttatgactgtaatgatatcaaaccttgcatttgcattaacaaatattctcggagagaaagggttgaggaagaagaagagagtggaagtaacatctgtccactactatggctctctcaccttgacatccattcagtttattgcaccattagccttgttatttgagggtccccgtatgtgggctgctggttgggagatggcaacttcgaagcacggtgctgatgcaatgataatgcttttactgtcgatctgca

SEQ ID NO: 2671 - DNA, 164 bp, Lilium asiatic
gaaaatgcttacccagggaggtgctctgtaacttatcagcgggtcaatatacttcatactgcgactttgggttgatgacaaaccacatactcttacttgaagaggctcttcggacctttattcaaaggtatacttgattatgtgttgatggacgaaatgaagta

SEQ ID NO: 2672 - DNA, 114 bp, Lilium asiatic
gtagaaaagggttgatttgcaatatgagaccgaaaaacaatgcttgtctatggcgtgtgaacctgtgtttggtgcgaccctctcgtggaataatatagaaacgcgttttattca

SEQ ID NO: 2673 - DNA, 87 bp, Lilium asiatic
  modified_base (45)..(45): a, c, g, t, unknown, or other
ctttctcgttgattctaattagacctctgtattaaaacggaaaanaattcttgtctagggccatttaactgatcaagcgggctccac

SEQ ID NO: 2674 - DNA, 320 bp, Lilium asiatic
  modified_base (1)..(4): a, c, g, t, unknown, or other
  modified_base (32)..(32): a, c, g, t, unknown, or other
  modified_base (43)..(43): a, c, g, t, unknown, or other
  modified_base (182)..(184): a, c, g, t, unknown, or other
nnnncggacgaaatatcaaatattatgaaagntatttatttgntcgttatcaaacatagaaaatcatgtcgctaatttggtagtaaaaatttactgtgtacccatcttataaatgctaaagaaaagatcttcgattgagagaaaatggaaggcaaattatgaggtcaatttttacatttttnnncaaacaatatactaatgatttcataaccttcgacatggttataaatctattgatgaacatacaaaaaggttctaagaacttcacagctgctgcaacctaaatgaggatatgaatacctgactgtcattcactacac

SEQ ID NO: 2675 - DNA, 307 bp, Lilium asiatic
  modified_base (25)..(25): a, c, g, t, unknown, or other
aaacagggccgacccacgcgtcctngttctcatgcgctgctttcttaagcaatttgtttcaccgttagggtgtgtagctattcgggcaacatttgaggttgcatggaacaatcaaatctgttttaagttcatttgacgtcccattttgatttttacttaatatacatttaaaagaactttgttacttgattatgaatttactgttagtttggctttcatcttagcttgcccttgattaatatatttagttacttggcttgtcttaaaaaaaaatataatattctgccgctttataagatccaatctt

SEQ ID NO: 2676 - DNA, 389 bp, Lilium asiatic
cgaccagcgtcggatgaaccataacagcagcagcaggatattggaaacctttttaagtgggcttggtgcgggaacagcttaataatcttgagttgattggaaaccgtcccttaactacgtgtgttgggcaactaccttattttacttaattccagtttcctgtccattagtgacagagctacattaatcttcaatatagggaaccttctgggtccttgatttctgacttggttgaaagaagttgccggtagcctaataaaggttggtgaataatgacacagtttgtatggaagagaatggaatggtcagcttcttgcgcttttgaagattttctagcggatgtagagacatctgtgcaaagcgctgtatcgcacccatcttgtacatga

SEQ ID NO: 2677 - DNA, 290 bp, Lilium asiatic
gcagaaatggcggccgttactaccacggcctctttcccgtcaagttcatccggtgctccggctgcgtcaagtgctgtcctaagcataaggcactcaagacgttccaggtcagtgaacattgtccatcatgcacctgctcgtgatgttcaagaggcctgtgcctttgatggctacgtgctacccaaactttatgcacaacaaaaggactgtattctctgtgcaatccatgctcacattgcccgggtgagatctcgcactgacaagatgaaccctttccctccttaccgttt

SEQ ID NO: 2678 - DNA, 397 bp, Lilium asiatic
cgtgcggcacagaaagatgagcaataagcacacactttttggaattttgtgtcacaatttgcgttctgcgattgctcgtggtcaatgcaggggaatctatgcaagcacgtaataaaagctaacatgctttgtcagaatcggaaagattatcgaccgtctttgtcgcatcagtcgttccaagatatcctacttaacctgtggaaaaagcctatggacgattcactagcactcgatctatcacttgccatggcttcccaaatgcaggataaagttcagatgttagtcgaacttgttacatctagtgatgttgctagtgtgaccaacaatctaccattgaagtgggcaagtcgaaaagggcgaacatttgttggtaagccgcctaatggtactcttactc

SEQ ID NO: 2679 - DNA, 428 bp, Lilium asiatic
aaaatgttctctatgaccatgatgacaagttgatgcctcacataatgttctttgctgctgataatatccctccattgcaagagctgacataccactacaattacagtgtagatcaggttcatgactccgagggaaatataaagcggaaaacttgttactgtggttctcctgattgtaccggaaggctttattgacattggcttctaatgggttgagagtttatggctcttgtattttgttttctcatctatgttgcctaacttgaacccgcaaagaggatatgagacggcttaagatgatactcagctcagtagtgctctctcaagaatgttggatgctggggagctgtttatttaccgaaccagaaagtaactgcagcgattagtatgttttaatagtaatataatatactggagagctctgtatac

SEQ ID NO: 2680 - DNA, 293 bp, Lilium asiatic
atcatatcattctatactaagaacaacgtgtattttccgaagtacttcattcctctttccttctatgagatggagtgatatccattggaatcgattcatcaggtcctagatttttcttttctagacctttgatccctatggatttcaataggagactcttgctccaaagatggaacatgataatgaagcccctaggtgggtgttctcatatgtctgattatttagaatgtttcaaagtcaaagtattcttaaagaaatccacatctatggattctaagataggatcatacgct

SEQ ID NO: 2681 - DNA, 397 bp, Lilium asiatic
cggttgataagagagatgtttggctatgcacgtgagcacttaccttgcatcatattcatggacgaaattgacgctattggtgggcgtcgttttagtgaaggaacaagtgcagatcgcgagattcagcgtacactaatggaactacttaatcagcttgatggatttgattcacttgggaaggttaaaatgataatggctacaaatcgacctgatgttctggatccagcacttcttcgtcctggtcgtttagacaggaagatagagattccattgcctaatgagcagtctagaatggaaatcctcaaaatccatgctgctggcattgccaaacacggcgagatagattacgaagcagttgtaaaacttgctgaaggctcaaatgagctgatcttcggaa

SEQ ID NO: 2682 - DNA, 209 bp, Lilium asiatic
tgagctcgtcatcaagacggcgctcttggccgtaagggttcttcacacgccttatatggatgattggattcttcaccggcctattacgagtacgtagtctgtactggttggatatttgatgtaatctcataatatgaactaaaacgaatatttttaaaccctttatggaaaaaggatcctaacaagaacgccgctccaattctaaatgc

SEQ ID NO: 2683 - DNA, 259 bp, Lilium asiatic
gctcatagggatttccagatctctgaacttacccattgcatgttcgagcgaactttaacttcttcattggctgaactgcttggatatttgtagtaatctcataattgtactaaaacgaatttttcaaaacctttaggaataaggtcctaacaggacgccgctcaatatcagtgctgcatcaacaaatcgcgtggaaatttgataacccgtgttattgtttcaattcattatgagagtgaagcatttggactagtttttc

SEQ ID NO: 2684 - DNA, 226 bp, Lilium asiatic
  modified_base (26)..(26): a, c, g, t, unknown, or other
  modified_base (33)..(33): a, c, g, t, unknown, or other
atataaacccaaacatttttttcatnggtatgnataaaccggacaaataacagggtctgttggcccaattaaaagagaacaaagagctctgaactaatgccaacaacggatgctcgttcatagagggcttcatgagctgtagacacaggaaaaacgaagtcggagctcttatcaaaaacttacaccctttcattagcgttgatgaccaagtcactgcatgagtgac

SEQ ID NO: 2685 - DNA, 251 bp, Lilium asiatic
accggcgatcccaaagagggtttggtttatgtttcggatggcgtcgaagttgctacagctgcagggaaaggccgcccaggcctcgagtttcgtggctaaacacgggtgcgcttactacaagcagctcttggagaagaacaagcagtatatcgtggatccgccgactgcggagacgtgccaagagctgtcgaagaagttgttttacactcggcttgcgaatattcctttgcgctatcaagagttttggaaag

SEQ ID NO: 2686 - DNA, 201 bp, Lilium asiatic
  modified_base (171)..(171): a, c, g, t, unknown, or other
cactcatccgcgaacgtcaaacctttttctttttctctacagacactgcacaataattgggggacgtgtgctacaaaaaagggcgagaaaccctatgtcctccaaatttgtcacttaacaattttgcgagcttcttaatataatacctacaatcacttgattctgttccanatccaatcaatactccatatccatacaatc

SEQ ID NO: 2687 - DNA, 402 bp, Lilium asiatic
  modified_base (159)..(161): a, c, g, t, unknown, or other
  modified_base (163)..(163): a, c, g, t, unknown, or other
  modified_base (309)..(310): a, c, g, t, unknown, or other
  modified_base (312)..(313): a, c, g, t, unknown, or other
cgaagatgaagatgattacttctccaatactcggcctcctcgccatcatcggggtgctgactccatctatcttggcgaatccctatcgcaattctctcaagtccggggaaagtctaaaagccttcgaagctctgagctacaagaacttccttttcatannncnaccaaactgcaacctcgtcctctaccatgattccaccgcagtgtggtcgaccaagaccggcggccaagattacggttgttacgccacattgcacaacggcggcaacctggtcgtctacagccccaacgccatacccctgtggcagnncnncaacggaaccacaggaggggaatatgtcattcttcttcaaaagaacggagatgccgtcatcttcggcactgctaaatggtgggtggtat

SEQ ID NO: 2688 - DNA, 306 bp, Lilium asiatic
  modified_base (165)..(165): a, c, g, t, unknown, or other
ccgcttttgtttcaactcaatgttatggaccatcatggaacaaagatcattggggttaatgggcggttcaatgatgacgctggaatggagcttgattttgaatctgatccgaaggatattatgattaatagcgcggacagacatttaccgaagaagagtattgancttatacttattcataaatatgttgctaatcttcttcattcttctatcagagagcactcttctgtcctataccttcttctaccggaaaattttaagatcatcttgcgtggtcaagtagttaaacaccaccacatttgctta

SEQ ID NO: 2689 - DNA, 300 bp, Lilium asiatic
  modified_base (158)..(162): a, c, g, t, unknown, or other
cttttgtatcaacttaatgttatggaccatcatggaacaaagatcattgaggttaatggggggttcaatgatgacgctggaatggagcttgactttgaatctgatcccaaagacattatgattaatagcgcggacagacatgtaccgaataatagtgnnnnncgtatacttagacatagatatgtttctaatcgtgacaatttttctctcagatagaactacagtgtcctataccttcgcgtaccgaatgattgtaacatcatactgcgtgggcaagtaataaaacaccaccacattgtt

SEQ ID NO: 2690 - DNA, 267 bp, Lilium asiatic
ctgttgaatcaaattaatgtcttggactttcatggaacaaacatcatcgaggttaatcgtgggttcaatgatgaccctggaatggagcttatcttttgaatctgatccgaaagatatcatcatttattgcgcggacagacatgtaccatagaagagtaatgagcatatacttatcgatacatctgttgctacacgattacattcttctataagaaagcactcgtctgtcctatacctcctggtacgggaaaatttcacgatcatttt

SEQ ID NO: 2691 - DNA, 367 bp, Lilium asiatic
  modified_base (164)..(165): a, c, g, t, unknown, or other
  modified_base (310)..(310): a, c, g, t, unknown, or other
  modified_base (312)..(312): a, c, g, t, unknown, or other
accaacactctttagacttcatttcctccttgctcttctacggcccgccggggacatgggagaccaccaacgggctcggcattgcccaccaactgttctgacctgaattgttcaggtcaagagttctggaacttaatgctagtgatgatcgcggtatttttttnnaaggacaaaaataaagaattttgctgctgttgccgcatctacttctgtatctcatgaaggtggctatccacttccacctttcaagatcattatcttggatgaggctgactcgatgacggaagatgctcagaatgccttgattggnanatttgaaacttattgcaaagtgacaagattcttttttatatgcaattacttcaac

SEQ ID NO: 2692 - DNA, 396 bp, Lilium asiatic
  modified_base (11)..(11): a, c, g, t, unknown, or other
  modified_base (156)..(160): a, c, g, t, unknown, or other
  modified_base (305)..(308): a, c, g, t, unknown, or other
ggctctttgancaccattcacgaatgctacatcagtgccttcgatatataaggtagtaaagactgtctatgcttcccctagccgtgtcgattttcagctagacttcaaaaaggacgttgaaactgtacctgcctatccaaatatttgctttgctgnnnnncactttgatgacactttcgatgctgtggttttgaccgaaacagatcattgctactgtgtgcttttgaattcaaatggaggggcggcttttccagaagcagaaactgtaaatgaccccagttcttgtagggcttcaacagttggcnnnnattctgagaaagcaaaagagccaaagcttacactcttctcgggatttgtcaactaccagaatgttagacaagcatatgatgctgggag

SEQ ID NO: 2693 - DNA, 235 bp, Lilium asiatic
  modified_base (132)..(134): a, c, g, t, unknown, or other
aaatgtcaaaaacaaaacagctaatgggggaggcatgcattgagctgcaggtctttctggaggggcctacgtcgctggaaaaccgagtatgcttcttgcacccccacctaagggagctggaatatttttttnnncgctttcacccacacccaacgatcctgcagttgccagaaagacatcaggtcacaatgtcggagtgaaagtccctaaagaaactgcaaggcccacaacagat

SEQ ID NO: 2694 - DNA, 290 bp, Lilium asiatic
  modified_base (192)..(192): a, c, g, t, unknown, or other
aattaccgacgcggcccactcatccgctgaatcggtaccgctggtttttatgagtcttccctcgggtgcttcgcggctgagatacggacaagatgggagaccaggttggcaattcatagtcagttcttctacacgatgttctagactctcggcattttgaagagctatatcaatattatacgactttttttncttggcacctctgtgatccagatgcataaagagtttttagggctttgatgaaagcttggaacaaagcatctgtggtctcaaacttctacacccggttg

SEQ ID NO: 2695 - DNA, 254 bp, Lilium asiatic
  modified_base (171)..(174): a, c, g, t, unknown, or other
cgcgtccgtattgcttgaagccatctcttttagaatgtgcagcgaatctgacaccatgcgggtaaatgctgaactgaagctggcgtatatcaccaaaatcttccggtgggaagctgggtattgatgcacaatggatattgctcatgatagagctggattctacatattttnnnnatgcgggctatgggtgccatcaatttacactgttcctgaaatgtgggttgtcaaccaccctgttgaccttggtattcagc

SEQ ID NO: 2696 - DNA, 284 bp, Lilium asiatic
  modified_base (159)..(160): a, c, g, t, unknown, or other
  modified_base (162)..(162): a, c, g, t, unknown, or other
ctcaagtttaaagcatcttttcacgctttcgagaacgctaaggactacacggcatcagtggaaccaccaaaggaggagcattattattcccgaagaagaagaaaacttgatcgtggacaaacctctctctgaagagaaggaccccccccccaacggttnntntacaataacccctgcccatgctgcaaatcactcatacatagatggagaggatgtgtcttgcaagatctccaaacagccccatcttttgacagggcgctagatcatctcattgaaacagaata

SEQ ID NO: 2697 - DNA, 311 bp, Lilium asiatic
  modified_base (174)..(175): a, c, g, t, unknown, or other
ccacgcgtacgcagactgtgtaacgggtctttctaaagatctaaaaaaaccgcacagagaaggggtccagaacacgatcaactgggtgacgctcgttgcagttctgatcgcctccattgcctttatggccatattcaatctgccaggtcagtatgttcaacaaggtcattttanntgcgaagctaacatctcttctgataaaaggtttcatgtgtactgcctcttgaacgctactgctctgtccatatccctggcaggcgtcgacgatcacatcactctggtcgcgtgggaaaccggtgctcaaaaacatg

SEQ ID NO: 2698 - DNA, 147 bp, Lilium asiatic
cgtacatttagagaacaggtgtttagttttcaaaggcagaccacatgctatgggacaaacggaagggcatggggtgccaatgtatccttgcggttctacttgtttaagctcacaacaattacactgccaatgcttctccgctattaa

SEQ ID NO: 2699 - DNA, 263 bp, Lilium asiatic
  modified_base (138)..(142): a, c, g, t, unknown, or other
aaccttttgaaaatagaagaggctgagggcaatctgggggcgtgttgggggtatgtcaacgttaacattgacggagctccgtatctgaggaaagttgatctgaagacttactgcaattacaaggagctgtctatggcnnnnnagaagatgttcagtggattcaccattggccaatgtggtggtcaatgggcgcctggtacagatggcgtgaacgagattagattgatggatcttcttaacgggtctgaatatgtgcttactta

SEQ ID NO: 2700 - DNA, 367 bp, Lilium asiatic
ggggaagacccacgcgtacgatgagatcgtgagtagcggatcgtgagaacatgggtccaatgagaatgtgatccgttagtggctcactttgtgaccctgtaaataggttttctctagattaaaaaagagaagcatcagaagacgtttttttcaaagccccagcagagggaagacgtttatcaaaccccagtaaagagaagtacggcgagcatgttttttattttactatattgaaggtatccccttcctgttacactacctgctccgatttccatcagagaagtggcagcagagagtgctgctctttgccttctctccgctcttctttcatctggtttaagagcccggcgagatgtcgcacgacgat

SEQ ID NO: 2701 - DNA, 413 bp, Lilium asiatic
  modified_base (369)..(369): a, c, g, t, unknown, or other
acgatgagatcgtgagtagcggatcgtgagaacatgggtccaatgagaatgtgatccgttagtgtctcactttggggccctataaataggttttctctagattaaaaaagagaagcaacagaagacgtttttttcaaagccccagcaaagggaagacgtttatcaaaccccagtaaaggaagtacggtgagtttgttttttattttactatttttaagttatccccttcctgttacactacctcctccgatttccatcagagaagtggcagcagagagtgctgctcttttcctcctctccgtcgttctttcatctggtataagagcccggcgagatgtcgcacgacgatccgaccaaccgtctcatccncactccacgagcgacagacgaactcggccgctaggtggtggtgc

SEQ ID NO: 2702 - DNA, 370 bp, Lilium asiatic
gagtctgttaagtcaagcctgaacattagccctgatgtagcagtagaagaagaagatgacgtcgaagaaccagagggtgaagagaaagaatcaactcctgagggagagaatacagaagctttcgaagaggaggagggtggacacgacgagctatatactatgggaagtgtatccccttttctttctgtgtgtgcccctgaaaaaaatatttgtagccccaagtgtggaactctttgtaggaaaaatgcacaacgcgctctgtggcgctcttattaaaatagaggatcgagtgataattgtcttgtacacgtaacatatgagattttggagaacttttaggagtttctaatgttgttagtgatgtctgcat

SEQ ID NO: 2703 - DNA, 306 bp, Lilium asiatic
atgagatcgtgagtagcggatcgtgagaacatgggtccaatgagaatgtgatccgttagtgtctcactttgtaaccctataaataggttttctctagattaaaaaagagaagcaacagaagacgtttttttcaaagccccagcaaagggaagacgtttatcaaaccccagtaaaggaagtacggtgagtttgttttttattttactatttttaagttatccccttcctgttacactacctcctccgatttccatcagagaagtggcagcagagagtgctgctcttttcctcctctccgtcgttctt

SEQ ID NO: 2704 - DNA, 322 bp, Lilium asiatic
aattaatcaactccttatttatataatacataatctttctaatatgatgatcttttacactactagctatatactatggaatttgtatcctttcttctttctttattttcccctgaataacatttttttatccaaatgtttttaactttttttataaattttcatcaagctctttttttcttcttattaaaataaattatctatttattattgtcttttaaacgttacatattaaattttctctaacttttaccattttctaatgttgatatttattttctcttatccactttattttgtttcttgattccctcttttatta

SEQ ID NO: 2705 - DNA, 420 bp, Lilium asiatic
gtcgaagtagcggagaagtatgaagagatgcagttcagattggtgtatggatgagtttctggagctggatcagccaccgacaggggcggaggccggggaggtcttggacgcgctcgaagggttttttctccctcgactagcacagaagccgagaatctctggtgttccgtttgctgatgtttacagcgagggcttgtttgattttcgcaatcaggaaacaataagtagcccgatctggtctcacaaaaactccaacatctcagccagcatcaagtcccaatcatccacatgcgagaaccaagctcttggaggatcaagcggttcggagcaatcagacgacgaatcactggatattgaggctgggtcgtgtgaacagggcactggtgtatcagatttaaagcgcatgagaaggatggtgtc

SEQ ID NO: 2706 - DNA, 206 bp, Lilium asiatic
tatatgaggtgctcctggtgacgattctcttccccctttttcgcccaataatctggaataaatgtccatggggctgccccctaaatgtggctcagaagtcgagcgaccttgacaatggcctacccgtgtccatgtccccctccgactcaaacgaagaagtcgtgcatctcctcaccgacctcaaaatcgagttcacatctcctccc

SEQ ID NO: 2707 - DNA, 422 bp, Lilium asiatic
  modified_base (352)..(352): a, c, g, t, unknown, or other
gtctacgagtgctctttcgttcagtctgacctaactgacctcccctttttttgcgtcaagaattaaactcgggaagaaaggtgttgaagctctaatacccgctgatcttcaggggttgacggaatatgaggcaaaagcactggaagctctgaagccggaactgaaggccagcattgagaagggcgtggcatttgcgcagaagcagacagctggggctgcgtctgcttgagttaagattgcttcgatccttctgttgcaggcagtaatacaagaaccgaataagaaaagccgaggtttatgtttctcagttttgcagtgtagacggccaaatctttttttgggtgacatgtangttggtgaagtgttggagggtgttaagagtatagagttcttgtacaatgttgctttggtttggtatgagt

SEQ ID NO: 2708 - DNA, 418 bp, Lilium asiatic
cgaggagaaccttgagagcattgcaacctgccccaccgccgaacttcactgacttcgacggtgacgagtgtgccatcttcttttctaatatcggcttcatatctgatctggatatccttgttgtctagatctgctccagatccgaatctacaccatcgccggctccgtcacctccccaacaattagatatgcaccagatctgatccatctaaccagatctaatccggatcagccaaacctatcatatcttatccattcggatctgatctggattagctggatcagccggatatgacccatccagatttgatctagatatgacccatatttacataaaccatatccatacaattctgatttagatatgatacattaagatctgatgcatacaaatatgatccagtcagatctgatccat

SEQ ID NO: 2709 - DNA, 412 bp, Lilium asiatic
ctcgatccgaggccgaattcttgctggcacctgccacagtgctaagatgaaccgaaccatcattgttcggcggaactacctccactatgttaagaagtatcaaaggtatgagaagcgacattccaatattcctgcccactgttccccctgttttcgtgtgaaggaaggggatcatgtcatcataggccaatgcaggcctttggcaaagactgttcgatttaatgtgttgaaggtcgttcctgcgggatcaactggtggaggcaagaaggcttttactgtagtttaagttgctttaaaatgttgtggttcaaaggttatccgaacattatagatgtggattttgatttggcggctagtattatgtaatcgttttgtttcgacactggtttagtacaccagtgttttggttctc

SEQ ID NO: 2710 - DNA, 428 bp, Lilium asiatic
ctactacatcacatctgctatatggggtgctggtggtggcgggctcttccccctttttcgcccaagaatctgcaataaatgtcggtggtgctgccccctaaatgtggctcagaagtcgagcgaccttgacaatggcctccccgtgtccatgtccccctccgactcgagcgaagaagtcgtgcatctcctcaccgacctcaaaatcgagttcacatctcctccctccgatggtgggtcgccagtatggaagctggacagctctgagcccaacggccaacgatatgtgacactaaacgggtctccgcacaacgaaatcaaccaggacaacatgttcaaaattgagaaagcaggtgctttgggctacaaactgctatactgccccagtgtagccggcgtccctgccgatggtccttgcggtagtctgggta

SEQ ID NO: 2711 - DNA, 420 bp, Lilium asiatic
cggacgcgtgggcggacgcgtgggcagcagggaacatcgtccatccgagctaagtaattgggtcgaaaatgacccgtgccagcagcagtagcagcagccggcgtgtgacgctggtactgctcggtctccgcctgctgcttctggttggtgttgcgcaggcggtagtggagttggtgcctgctgatgataatatcgccgccgccgctgctggcacggcggtggacgatggcgagccgcctcagcagtgcgcgaccccggtgagcgtggaggaggcgtgccgcggcgcgtccgatacgcacgccggcgtggcctacgaccactgcatggcgtcgctgggcgccgacccgcgcagcaaggaggccggcaacaagaacatgcacgggctggcggtgctggccaccaggatggccatcgaccacg

SEQ ID NO: 2712 - DNA, 425 bp, Lilium asiatic
ctaatacccgtatgatcgctctaataaaaaggtctcccactgctggggcaaggttttgtgaatttgctttatctgaggggtcatcagcaaagtctctcatggagcttctcaaaataacagtcagtttagctctcgcctctaagagcctgaagtctgatcagattgatgggctgttcattgcttcagcgaatatatctcgcagcttagttagcgagccttccagtaaggcgagtctcagagagttgttttcaagtgagaaactgaagagcttgcttactgcagcagcctctcagcgtgctcagactgctgtcttgagcattgcttccgttgtttctccacataacttggctggatttcgtgatcagttcatggctttggtaactaattgtgttggactatctggaaatgtagatacacaagaagta

SEQ ID NO: 2713 - DNA, 420 bp, Lilium asiatic
cttatctggtctaccggtacctccggcaaaggcagtggatgctacctaaagtttcagagggatgcaaagttcgacatctacaacagtgccaatggtcttgtgtggcggctcccatttcgctggccggaagcaagttacatcttgatcgtgcagaaaaagccaatcatcggcatatatggccctcagagctggtcgaccaactgggacggccttacccgtcactccactgcacaacccaataaccagaaaatcagcatggtcaccggcaagtgatggatctcgctgctggactactttcagtttgagaataatctgcactgtttgttgtttggttttagttcggaataatatccgctgttgttcgaatttagttccacgagtaccatggtattgtagtagtaatatccccgtgtaatcgta

SEQ ID NO: 2714 - DNA, 431 bp, Lilium asiatic
gcgagggtttggagattagggttttgagctcatcaatggcacctctcgcccccagtactcagccatgggtggagaaataccgccccagacaggtcaaggacgtcgcccaccaagacgaggtcgttcgcgtcctcaccaacactctcgagacctccaactgccctcacatgctcttctacggcccgccggggacagggaagaccaccaccgccctcgccattgcccaccaactgttcggacctgaattgtacaggtcaagagttctggaacttaatgctagtgatgatcgcggaatcaatgtagtaaggacaaaaataaagaattttgctgctgttgccgtatctacttctgtatctcatgaaggtggctatccacgtccacctttcaagatcattatcttggatgaggctgactcgatgacggaagatgct

SEQ ID NO: 2715 - DNA, 362 bp, Lilium asiatic
tccacgccttcaaaaaaattggttaattgtgttaaagaacggggatctatcttcttcaggagatcttgttgggatcaatctggcgattccaagaagaaaatcaacccaacacactatcgtgaaccaacgttttataccaaggtctttaaagaaagtcattcgcatgatgcccatgggaattcattcgagctctctcttatttcttgcaaatgtattgcagcttatgtgaggaacaaaaagaatcataatcaaatttgttggttatggcaaaaagtgaaatcaactgatgacagaggctttcaacgtttcttggataatgttcagtacaaaagcagtggaattttactctatgaacgtgtctt

SEQ ID NO: 2716 - DNA, 419 bp, Lilium asiatic
cagtatagaggcatgctgaagatcgtcgaggaggagttctcgggccctgccgtcaatgtggtcacggagctgcttcttggattggtgctttgtatgtgggcggggctggctgtcccggccaagttcctctctattgtcccggattctgatgagaacagagtggtttcattacccgtcaatgtggactttatgatcttcaatcaccgtgggaaagtgctcccttgcaattcaggaatgaagttgaaagcatagtgctcctgatgacgttgtttaggaattaattatgaaaacaggttcaaagaatttatttgaaattttgttttgtatgtttagtctgtctacatttcttgtttttcgggaaagagcacaggggtaaggctgtggacatctgaacatccctaggaccccacaatggtggg

SEQ ID NO: 2717 - DNA, 346 bp, Lilium asiatic
  modified_base (10)..(10): a, c, g, t, unknown, or other
  modified_base (12)..(12): a, c, g, t, unknown, or other
caaactcttntncttcttttatcaaccaattttgtcactcccaaagtgactcatatatcggcttgtttcataatatgcttctccatcttttttaaattcacaactctctttgcatcaattccattcacaatctttgctgctctatattgtgttttatttgacattcttttcccattcagtctctcatttctccaattcaccaacattaactcaatgcgcaacctctttataatccctgtctccatctttctcctcttatccattccaaaatactttttcaactacacaataccccctcaaaattttccttatcacaccaatccaggatccttcaaccactatatca

SEQ ID NO: 2718 - DNA, 342 bp, Lilium asiatic
cggacgcgtgggaaaaaaaaaaaaaaaaaaaaaaaaaaaaaaaaaacgggcaaacaaaagggaagaagaaaaaaaacaaacacaaacaaacaaaaaaaaaaaaaaaaaaaaagcgaaaccaaaaaaaaaaaaaaaaggggcgcccgttataaaggaccaaactttacatacccttgcttgccacaactaaatcttcttttgggggcaccaaaattaaatcacctggccggcaattaaaaacgccggaactgaaaaaacctctccttaccccaacaaaatggatttgaaaaaaaaccccctttcgacagttggcttaaaaacaaaaagccccgaaccaacccc

SEQ ID NO: 2719 - DNA, 69 bp, Lilium asiatic
cgaatccacctgctctcactgccgcctcttctctcgcgatggctgggttcatagctcgagggaccattc

SEQ ID NO: 2720 - DNA, 425 bp, Lilium asiatic
aagacgtacccgcagcatgctgggacgattttcaagagtggatacctcgtgatcaaagggaggccctgcaaggttgttgaggtctcgacctccaaaactgggaagcatgggcatgctaaatgccactttgtggctatagacattttcaatggcaagaaacttgaggatattgttccctcatctcataattgtgatgtcccccatgttactcgtactgattatcagctcattgatatctcggaagatggatttgtgagccttctcactgaaaatggccatacaaaggatgacctgaggcttccaactgatgatgccctgcttacccaaatcagagagggatttggtgaagggaaggatctggtggtgagtgtgatgtctgctatgggtgaggagcagatctgcggtctcaaggatattggccccaa

SEQ ID NO: 2721 - DNA, 429 bp, Lilium asiatic
cggacgcgtgggaatttagcagtgcctcctccacgtcggccggtcatccagggccgtcgcgccggagcagccgcccctcttctcattcgtcaactcgagcttttttgtgtgtttgatcgcccctcagttctgaaacaatggccggtgattgatttgtgtgttgtttagatctatgttgcgactccacgtgccaatacccatttgtagaaaacaatttgaggtgtagttatttcaagggatccagttccccataagtgaaactagaagaacaaatgcaatttctgaaaagataatcaaatacatttggtggttcttaagaaattatttcaagggatccagttccccccttaagtgaaacattccctctctgaggcagagggacctttcaaaggtctagtgacataagtgtgaatcacacctatggcacgc

SEQ ID NO: 2722 - DNA, 416 bp, Lilium asiatic
agagcccttgctttgacactgaacgatacaaaaacagcagtgaacaagctccatcaaatggcaaatgtacttgttggcatcattgttatagctatctggcttctcatattggagattgcaacaaccaaattttttgttttcttgagctctcaaattcttttggctgttttcatctttggaaacacattgaagatgatctttgaagctattatattcttatttgtaatgcatccgtttgacgtcggtgatcgatgtgaagtggaaggaaatcagatgatagttgaggagatgaatattctgacaacggtcttcctaaaggctgataacacgaaggttacgtatccaaacaccctgctagctacccaacccatcagtaacttctatcggagtccagatcagggagatgcaatcgactt

SEQ ID NO: 2723 - DNA, 94 bp, Lilium asiatic
  modified_base (27)..(27): a, c, g, t, unknown, or other
  modified_base (74)..(74): a, c, g, t, unknown, or other
  modified_base (84)..(84): a, c, g, t, unknown, or other
  modified_base (86)..(86): a, c, g, t, unknown, or other
cgaacccgcaagccgaggcagaccgangggaacacaggaaaaaacagggcagggaaccagcgacacaccggacncggacacaancnaggaaaag

SEQ ID NO: 2724 - DNA, 267 bp, Lilium asiatic
ggttgctcctggagcaacggaaccgcatggtgcgcttatgtggcaggcggaatcatggggaagatacttgtcatgcgcgaaacattgatatccgggaaccccttgggaagaagctaccaaacatgaacactaatacgggaacgaattacttggtagccgttaacgagaaactgtatgccatcgggggatatgatgggaaagaaatggattcgagcgtgagaagctaccaacccacgtcaggatcaagggtcaagagtgaacctatga

SEQ ID NO: 2725 - DNA, 419 bp, Lilium asiatic
catggccagtgtgctggcgaggtaccggaagtcgcttattgagaggaggaagcatcatttgggctatccatataatgtggactttgactatggcgcccttgggcaactgcaacatttctctattaacaaccttggtgatccattcatcgaaagcaattatggcgttcattcgaggcaatttgaagttggggtattggattggtttgctcgtctttgggaattggaaaagaatgagtactggggctacataacaaattgtggcactgaagggaatttacacggtattcttgttgggagggaggtttttccggatgggattttgtatgcctcaaaggaatcccattactcggttttcaaagcagcaaaaatgtatagaatggaatgcatacggattgatacttgcatctccggtgaaattg

SEQ ID NO: 2726 - DNA, 364 bp, Lilium asiatic
ggctggcctaaccgatgtgggactaaactcaatacgccccctcacgcgtggcacgatcagagtcctagcgcggggagaatatggtgacttacgtggagcatattgggcccgagaatagcctgccctgccctaatatcatgttaagaaccagagcatctcaacctaaaaccaattggttgtagatggagtagccctttgacatttttatattggactgcaaggctcacctaaccgacgtgggactaaactcaataatttgaaattagaaatttgcgtcttctgaatgttgaaggtatgctccacaacattgcatattgattcatgacaatgatggtaactctcaagcatattgaggaattttggg

SEQ ID NO: 2727 - DNA, 424 bp, Lilium asiatic
cggacgcgtgggcggacgcgtggtgaaagatcctaagaagatatatgttggaggtattccggattactcgtgcgaggattatataagtagcttctttgagggatgtggtactgtgactgaagttgattgcattatgtttcctgaaactgagaagatgagagggattgctatgcttacatttaaggtcgtaaaacatgaatggcctaccaggtggcaatccttcattcctgatctagtgtcaacagcaaagagtagtgaaagcatctgtgagaattgcatggctatattgaaactctctagtgaagaagtttttaatttcttgagaggagagatgactcacttgaaaatcaatgaccttaagaagtccttgaatagtggtccgtaaacttaaggagagtctctgtgttcgagtctctccacccca

SEQ ID NO: 2728 - DNA, 414 bp, Lilium asiatic
acgggctcgcctaaccgatgtcgtactaaactcattacaccccctcactcttggcacgatcacggttctatcgcgtggggagtatggtgacttacgtttagcatattgtgccccagaatatcctgcccttccctaatatcatgttaagaaccagagcatctcaacctaaaaccaattggctgtagatggagtaaccctttgacatttctatattggactgcaaggctaacctaaccgacgtgggactaaactcaataatttgaaattagaaatttgcgtcttctgaatgttgaaagcttgctacacaacattgcatattgatttatgaacaagaatagaactctcaagcatattgaggaattttgggaccacgaaattggcttaaatgaatacaaacatcaccggagttgtaat

SEQ ID NO: 2729 - DNA, 423 bp, Lilium asiatic
cggacgcgtgggcggacgcgtgggagagaggccaaatgaggcagcacggataactctaggtcagttgttgcccgaggtggcaatagatctacaagtggaggctgcagcaacagaagaaatttctgtagtagtactagtggttgaacaagccgagacaccgacggaggaggtttcagaggaagtgttgaaagagcactaagaagagacccctaaaaaggaggaatcaaataaagttgaagcgaaagaagttgagacaccaaaagaggaggaaccaaagaaagtggtggaagaggctgaacttgcaactgaagaagctgaaaaacccgaggtgcaggtagaaaatgttactccagacgttgcagtcgagaaaagcaaggtgatctctgatgaagctgctgctccccgggaaaataaaaaagttag

SEQ ID NO: 2730 - DNA, 417 bp, Lilium asiatic
gtcagatcgaggcgaacccatctccaccctccaattcccgataaggggctccaccatacggaatccgcacttcatctgctccgtcaaatcccaaatcagctgcatccgaccacctaagcatcttctagcagcttctccatccctccagaagaaccctagactttcaatttttcttgatttggttattgtgatcaaattacatctaaacccttgtttgtctatttgcaggtttcggctgcgtgaggcgctcgtatggaatccggatgaggggctataagaactgggctatggagcaaggagaggtgtctccaattcgagctgtggaggccacaagtagaggttactctctggtttaagcaaggaggaggtcggagtttatgtgagaagtttttaggtagtgattatgagggtgtgttt

SEQ ID NO: 2731 - DNA, 394 bp, Lilium asiatic
aggagctatgcaagagtatcaatccagatgaggctgtcgcgtatggtgctgctgtccaggctgccatcttgagcggtgagggcaatgagaaagtgcaggatctcctgttgttggacgtcacacccctctctcttgggttggagactgccggaggagtcatgacagtcttgattccaaagaatgccactattcctaccaagaaggagcaggttttctccacctactctgataaccaaccaggtgtcttgatccaagtttatgagggtgagagggcgaagaccagagacaacattctgcttggcaagtttgagctttctggcatttcctcctgctctcgggtgtcccgcagatcactgtctgctttgacatcgatgcaaatggtatcttaaatgtg

SEQ ID NO: 2732 - DNA, 92 bp, Lilium asiatic
gccaggcgactaataaagtgaaaccagacgaacaaaaaacctaatggccacaggggcacgggaccacccagggccaggaggaccacaagaaa

SEQ ID NO: 2733 - DNA, 313 bp, Lilium asiatic
  modified_base (276)..(276): a, c, g, t, unknown, or other
ccggcgtgagttccggatcgacccatcattctccttattctctcagatttctcactaatgtttcccaatgcctatataggtcccttttcggggaaggggccgtccgttgaggattataataaggctgttcctgctgataagaagcctgttgttaattagcccaatgtctgaaagaatgtcccggccttgaatgaggtggcctctgtcaagaataagaataggtcgtataagttggtggagacctacaatatctacatctttaaggtgtttaagcangtccactctttctttttgatcttcattatggctattt

SEQ ID NO: 2734 - DNA, 449 bp, Lilium asiatic
ccgggccgaaccacgcgtatcgacgacaccttccgtacttaactcgacaaactatgaaaatgcatttaacgatcttagaacaagggtgtatgtgcagaaagcgagactacccgtataataccgacttgttcattggcgaaagaactaacacggactataaaggagatcctgggtatctgagtatcagtcgatctcattgatgatatactgggtactgaagactctacagaatgggattcctagctagagcattcaaaatctccacagaaagaaccggtcgattagcgtaagctgcttaattcacctcctatatatatctgaaatcagatcgatgatgtgaagagataattgtcaaatactgaaaaaaaaaaaaaaaatgctcagtctatttttactatatcaacttaaactaacttggattttaatgaataacttttttttttaagaaa

SEQ ID NO: 2735 - DNA, 430 bp, Lilium asiatic
ggctgcccaaaatgtattttttggacaaaatgctcactccaggcctggagataggaggcgggcacatcttattttaattgagaacgaattatggagttccgggatgaatgtttgcttacgtgatcaattgatagactggaagcaaagatggcagatacctgaagttcccaaggttattcttcttgtgaactcagattctgataaagcaaaggctggttcacatgtcgaggtgatcatgaagcctctgagagcaagtacattagcggcatcgcttcatggagcattgggaattgaaactcgccagagaaaagaaaagcctaatggctcaagtttccttcataggcacctggctgggaagaatatattggtggttgatgataacaagacaaacctcagagttgctgaatattccctacagaagcatggggct

SEQ ID NO: 2736 - DNA, 306 bp, Lilium asiatic
gtctgatccaaacgtatatggcggacatagttctcactcctggcttcccgattggatgcggtctcatctcatggtcaattaaagcggagcctgtacttcctggcccaaagcttgcttacttggatgatgcgcagactggtttcttggcaaagctttaccggctgataccagaggtgcatatctggcgatcgcagattgtcacacaagtcaaggcgcgccacgatgagctttttatacttaaggatgcactccatacacaattggcacaactaatatcagactttcaagagcttcgggctacccctt

SEQ ID NO: 2737 - DNA, 246 bp, Lilium asiatic
gtctaacacatatttatataactgtcccaattttaacccctagtctctaccccggaagcagggccatattaggcgaattgagaccgacatacagaaccactgccacgatagttgctatcttgagcaacaggcctactctgatctaataaagcggatacgttacgtatccaaacttgtacttttcgagagctaacatattcataaagcataagctgtcgcacaattatacgtcattacttaatcctt

SEQ ID NO: 2738 - DNA, 391 bp, Lilium asiatic
cggacgcgtgggacttattcaattactctatctatagtcctgcgaacggccttctttctgcaaggggtggtcgacgtgacctatgtgttgacgtttctgttgtttcctcattcgtctctgtgggacttaaccaaatcagcagaacagcagcacaggaagctgagcatcgaaagatggttaaatatgagagactttgcgaagagcggaacattttgttcacgccttttattttggagacaactgttggtttccgtgcaaaaatggagcctctcctccgacatttagcggttgcccttactaacgtagagcgctcggaaattcacattattctgcattacattcgtgaacagatttcttttactgtccaacgtgcaacaacaaatggttttct

SEQ ID NO: 2739 - DNA, 238 bp, Lilium asiatic
ctgacctagtctttcagtacctataggctagaaactgtatgactgagatgctataatagcttacctgaccacagttacgctcaaatggacgacagggaagccagcatcagcgttaagcccaatgtaacttcgatgaatggacagccatcacttgacaatcctaggttacattctcatctgcaacacgctcttaagcgccaaaactgattcaagtcacaatttcatacgttttaagaat

SEQ ID NO: 2740 - DNA, 454 bp, Lilium asiatic
aagcacttgagctaatccgtttttctctgttcaatgatggcatccatattctatgaggagacgtcctagcaaggtttgttggagtcacttgataatgtgtttgttggtgagttttctatctctaaggaggtatctgggtggatgagtcaaggagatcttactcggatgaagatgagccattcgagagcacaaaacttattgatgttgaaggaagagttcaatgggagaactgaggaatgacttagaaacaatctaagccaagaaaacactatagcaagtcaagctcacactgtaaaggcaagtgccacaattgtggacatattgggcattatgtgcgggagtgttgggcaccaaagatagcacatgttgttggtgatggcaagggcctaggcaccaatagtggacactgtattatgaaatgttgtgcgttgaaagtggtgcataatgttggtgt

SEQ ID NO: 2741 - DNA, 372 bp, Lilium asiatic
  modified_base (194)..(194): a, c, g, t, unknown, or other
  modified_base (247)..(247): a, c, g, t, unknown, or other
tccggtggcagctggcattatgaccaactgggcattgcgaacaccgcgttgaaaagtggggacggaaagaaggacgaccgaaataccctcacgatgggtgatattctcattccttgagcatggggcttttaggctgatttctcttattgtacttgaattgactgcaatttactctacatttaattgaacattgnttttctcgaatgtgatgtttgattaatcaagattatgtaacctaattatattntccgaggacaaatttttcttttttaaaaatgggcggccctctataggatccaagcttactacgcgtcatgcgacgtcttacttttctatagtgtcaccttattaatttactggccgcgttttaca

SEQ ID NO: 2742 - DNA, 290 bp, Lilium asiatic
gtggcagctggcattatgaccaactgggcattggcgaagcaccgccgcttgaagaagttgtttgacggaaaagaaggacgaccgaaataccctcgacgatgggtgatatttcctccattcctctgaggcatggtggcttttaggcttgatttctctttgattgtacttgaattgtactgcaatttagctctacattttaattgaacattgttgtttctcgaatgtgatgtttgattaatcaagtattatgtaaacctaattatatttccgaggacaaaaaataaatatat

SEQ ID NO: 2743 - DNA, 290 bp, Lilium asiatic
gtggcagctggcattatgaccaactgggcattggcgaagcaccgtcgcgggaggaagttgtttgacggaaaagaaggacgaccgaaataccctcgacgatgggtgatatttcctccattcctctgaggcatggtggcttttaggcttgatttctctttgattgtacttgaattgtactgcaatttagctctacattttaattgaacattgttgtttctcgaatgtgatgtttgattaatcaagtattatgtaaacctaattatatttccgaggacaaaaaaaaaaattat

SEQ ID NO: 2744 - DNA, 222 bp, Lilium asiatic
catgtattgattgcatcgtctgaatgattatacaaacttgtataggatgctagggaatcatgaatgaattagtctttctttgcgatgaaaaaaaaaaaataaaaaataaaaaaaaaaggcaaacgaaccataggaatccaatcattacggactcctgcatgctacatcatagctcttctatgctgtcacccaattccatttcactgaccatcgttttacaac

SEQ ID NO: 2745 - DNA, 263 bp, Lilium asiatic
ctaacctgctctatttttatgttgtctttagggtttgcgctatgtttttgacccgtctcatgtgacagtttgtgttttgggatgttaatggttggatctgtccttcctctggtttatgtggactttgatttcagtagtttgtggtattttggcggtctttttctcctgagggaggaggagatatatgctgaacaatggattctatatgtttggttatatggatcaagttatcagataatttactggatttttttgctgtggtt

SEQ ID NO: 2746 - DNA, 301 bp, Lilium asiatic
cggacgcgtgggtgaagatcttgctgcactggagaaggattacgaggaggttggtgctgagtgtgctgaaggtgaggatggtgaagaacctgaagattattgagcagttacctatcgtaactgtgttttagcgtgtttttctataagctctgttcttgctggggttttcttgttagtgtcttctttttctttgttgaacttgaagcttggtatctttcaacttgtcactcctgtccagacttatatgtttggttatgtagctattgtttgatataaaaaaaaaaaaataatatataaaata

SEQ ID NO: 2747 - DNA, 280 bp, Lilium asiatic
attatattataaaaattaacaattgagtttgtgatattaatatttagaactaattaaatttttctattaattgaataataaattatacataatactttaaagcattaaatttattactgattttaaacaataaggacttattgatatttgttaatagtgttgagtttgtcccacttaatatatgttcaaataaatgagaacttaaaccaaattataaattgggctattcaaacccaacaattaattttaaagttatattattatttataaaatattattt

SEQ ID NO: 2748 - DNA, 318 bp, Lilium asiatic
tttaactaatataactctatactagatattcatcgtacttaaaaaagtaacaaaaacttagaaatgaaattaaaaataaccgtataactcaacaccattaagcacccatcatctctaccacttcttcactcacattactgagcatccattcgggttctcgtcactgaagtaattccccatcggctcaccttgtggtcgcatcggctgctgcggcggtggtgacggtctcggataccccatctgtgcgtatccaccgtcgtagcctccattcatcatcgccctctgctgcatcagagcagccatatactgctgctgata

SEQ ID NO: 2749 - DNA, 427 bp, Lilium asiatic
aagaatttggttaagttcattggggcttgtaaggagcctgtcatggtggtggtgaccgaactgctgctcgggggatcactgcgcaagtacatgcttaacctgagaccgcagagcttggatcctcgggtggcggtggggtttgcgctggatatttcgcgggctatggagtgcttgcattcacatgggatcattcatcgtgatctgaagcccgagaacatgcttttgaccgcagaccaccgaactgtgaaacttgtcgaccttggcttggcaagggaagagacactgaccgagatgatgactgccgaaacagggacataccgatggatggctcccgagttgtatagcaccgtcacactgagacatggagaaaagaaacactacagccataaagtagacgtttataggtctgcgatagtgctgagggagc

SEQ ID NO: 2750 - DNA, 125 bp, Lilium asiatic
tgggaaaaaaaaaaaaaaaaaaaaaattaaaaaaaaaaaaaagggcggtcgttctagcggatccaatctaacgtacgcgtgcgtgcaacctcttaactctcctatattgacacctaaatttatta

SEQ ID NO: 2751 - DNA, 337 bp, Lilium asiatic
tttttgtttatcatcacacatcgagaggtttcatcatatattcaagagatttcctagtacacctatttattcaatccattacagaaagattcattcataaccaccttattctacttcataaaaaaccttaccctattggtttctaacccagtcacttaaaattataaccaccttattctgcttcataaaaataccacaccttattgttttcaaacaacctactgaaatttacatcacccaaacaacaagattctaatggtgtgcaacctgaaaccagagttcaaaaaatccgaaatttttgtgccaaaccctctggcattattctcagtgttactta

SEQ ID NO: 2752 - DNA, 353 bp, Lilium asiatic
ataaatataaatttaaaaaaaaaaatttttaaaaataaaaaaaaaattttaaaaaaaataaaaaaatattaaaaattaaaaaaaaaaaaactttttttttaaatttaaaaaaaaaactaattaaaaaaaaaaaaaaaaaaatgaagggaaaaaaataaaaaaaaaaaaaaaattttaaaatttaaataaaaacaattacctctattaaatttacaatttttaaaccttaaaaaatttaaattttttttcaaacaaaaaaaaaaaaatattattttttccaaaaatcggctttaaaaaaggaaatttagaaaacttataaaaaaaaaacttctggaaactgattttataaattc

SEQ ID NO: 2753 - DNA, 408 bp, Lilium asiatic
  modified_base (394)..(394): a, c, g, t, unknown, or other
gcaggaaccaaccgcctagcattatcaactgaagggattcatctcaaacacaaaatgagagaacactgggggaaaaattatggaacacagaagttcgtaacttgccatagtatagggtgttgctcaagtgaagctgattattaaaacaaggtttgataaataatatggtagaaaagaaaactcggtcatgtgatgagctcatgctcactcaattgggaggttccgcaaccagtattgaatgtactcctgccaaactaacccaagtaaaatcctcagagatggtcgcatagtgcttttgtaaaatctgttgtggtcgcagtgcccccaaggtcgccagttctatatttcccctctgctatggtgttgagtatggcattttggatccgatcagctntatcattgagattc

SEQ ID NO: 2754 - DNA, 437 bp, Lilium asiatic
tattgactgaaactgagaaaagggctgtaatggcggaaaccatgttggaggctacattgcaggatcagtctagtcaagccaaagttcaacagcttccatctccaagatctgcatatgccaatcaagaatcatctccggatacgcctgcgaggaaaccgagcctgatttctaaacaatttagacttggattttttgacaagaacaagggtaatgccgaggactccacggaaggcaacaaaccgtttaatgatgggggacagagtgcagcgaccactcccaatggtgtgaatggccacttatagttggaagcagggccagcaattgggctcacccagtttattatgttggttcctgtcgatattagcaaagaagacatcgtccacttgcatggatggccaagggtgagattgttgctatactttttctggtgagtcatc

SEQ ID NO: 2755 - DNA, 457 bp, Lilium asiatic
cggacgcgtgggctcggcgatctggaagggaaatcggaaacccttggcgatgtctgaaggggggcgacaccccggccggcggagaggaaacacccgagatacaactcctcctcgacatggctaaagagttggaagatgagatatatgcgactacaggttgggatgatcctatgccagagcaggcagtcttggacaagatcaaggagttggatgctgagagaaaggcagttctaaataagatacatgagatccgcctgaagaatgaagaagatgcatatgagatacctgaacacgtcattgttgcctttgtcgacacaattgataaagcacgccggtattttgacttgaagcaacatctaagagactgccgctactttgaggagctcgactttgaaaaaactgaagttttcgaaattctatttgagagggtaaaagatgacaatcttttcgacaatga

SEQ ID NO: 2756 - DNA, 353 bp, Lilium asiatic
agcgaaacccaggctgctggaaccagtttacttggttgagatcgaggctcctgagcaagctcttggaggaatttatggtgttctcaatcagaaaagggggcatgtgtttgaggagatgcagcgacctggtactcccctctacaacatcaaggcttatctgcctgtcgttgagtcatttggtttctctggtgctttgagggcagcgacatctggccaggccttcccccagtgtgtctttgatcactgggacatgctgacatctgacccactcgaggctggctctcaggcatctgtgcttgtagccaccatccgcaagaggaaggggctgaaagagcagatgacccctctctctg

SEQ ID NO: 2757 - DNA, 403 bp, Lilium asiatic
ctcatggaatcctccatcaatttatattgacatcatgatagcaggttaaatatatcagtttaaaagttccaaacagaatgaaaagttccaccacacatacttttaaatattagggagaagcccatgataaaaggcaccaacatatccaaattagtcctcccttgctatgccgtaaaaatgcaaggtaagatactcaatatatcgactagtcctcatcaccatcgcttgaaacaaaatcatcatcatccgaatctgaatcgctctcatcattgtaatcgatgttccgagtcggcctttgcctaagccttttcttcgcctcaccgtgtccattaccctctggattggttccgtttctagagcggcacaatttttttactttcttcttgggcttagcatctttttt

SEQ ID NO: 2758 - DNA, 185 bp, Lilium asiatic
cccacgcgtccgctcgctgctggactactttcagtttgagaataatctgcactgtttgttgtttggttttagttcggaataatatccgctgttgttcgaatttagttccacgagtaccatggtattgtagtagtaatatccccgtgtaatcgtagctttattttaatttgatcttattttcataa

SEQ ID NO: 2759 - DNA, 305 bp, Lilium asiatic
acgtccgtcaaaaccctaactggcgtgacaggcacacttgcagttccgagctctaatactatatataatctcaaggctacgattcttgctaaggcgcgccttcaactagaccttccaaagctaatcttctatggctcacatcttagtgatactacaactgttgatagcttccttattcatacagagtcaacttatcgcccattgattacactcaagcaagtcatcccattatcagagcctacactcatgagcctaaccatttacctactaagtctaaaactatgctactgctaccattcttgggg

SEQ ID NO: 2760 - DNA, 278 bp, Lilium asiatic
ttccgctccggaattcccgcggcggcccacacatcctggcatttaaccaaacggtgatcatgattctttattatgtttatttttttcaccaaggtgaattaaaaaagtggtgtggtgatttattccaatgatatggggttattttattttattttgtgcgttctttattcttaataaccaacatataatcatatttatttaacgtcgaacgtccttgtgagttttaccgaccgaacaaaactgaatgtcatgttgtaacctttttgttgatgtaaatt

SEQ ID NO: 2761 - DNA, 345 bp, Lilium asiatic
  modified_base (52)..(52): a, c, g, t, unknown, or other
  modified_base (143)..(143): a, c, g, t, unknown, or other
  modified_base (184)..(184): a, c, g, t, unknown, or other
acgtagtgcagcctacgtcccatggcgtaccatgtaagcggcaacgcaatanttctcgtgcactgacatgcgtgagccggccggcgatgcctgggatctgcacggacctgcacgcctctcctgccatgatcgggcatgaggtntgtggagttgtggaccacagagaaagttcagatgtgattgntgggaattcaaagatttggggaagttttacctgcacagctctgtccccagtagaagacgcctgaaatacgccagatagattcataccaaccatgaacattcgaaaggcttcttaattgcactcttgcagtcgtgccttatcctagatcacagaggcgtgat

SEQ ID NO: 2762 - DNA, 394 bp, Lilium asiatic
acgctttcgtccacgcatccgtacggctgccagaacacgacttaaagccatgtgacaattcactgcgactgggctagagtggttcgaacgtgaacgaatatgaacttgtcacaaggaatttcagtgatactcggatgcttcggctttcacattcacgaacatattgatcctgctaatcaagtaactttaagaactcttgcatttttatgctggagttttcactcatgcctgatgtaaacattccaagacttaaggcaagctgattatttgatatgggttgcggtgtgcacaatgcattttcaaaattttggctatgacatcacatactctcttcccctttatgttgtattccacttctgacttgaaccaaatgctccctggtttataaataatg

SEQ ID NO: 2763 - DNA, 364 bp, Lilium asiatic
ttggttgggttttttatccctagtagggcatcattctattattaaaatttcgaaatagacttacaaatattgaatatatgactacttaatctccatatgaaatcaatcattcatactcaattcatacattcaaacactcgctccaatcctaacaagcattcaaacatttattctaacaagctactgactatcacacgaattcattaaccaactgaactcacctacattgaagaactcaaccttatcactctgtatcagcttatatctgaggagaactcacatccaaaaactccacttcagctatgactatcacacacacctgaatcaatctatctctctgagagaaatagttgaactagcaggt

SEQ ID NO: 2764 - DNA, 255 bp, Lilium asiatic
gtcaaaaaccttatactcagggctgaggcactgacatgtgatgaactgttacatctcatagatccctacaaatatggcaatgttaaaccggctaaggcttcacgcataccataactagctgctatttacattatcagctgaacttcatgatgcccatacttccatcttcagcacgatatctgagcaaaattaacattcaccaattattctcatggccttcaattctccagatctttgcccaacaacaccttagat

SEQ ID NO: 2765 - DNA, 394 bp, Lilium asiatic
acgcccactctagaaaacccaagcctacttactctctcattaccacgcactaactctgggatagggtcaactaaatggagtgcactgtccatcgcttcacaacattcatgactgagataaccctgccgatacccaacttaattgcaatgctcaacatgcccctttcgacaactaacatattaacgaacaatccctcacctatcacccttcacaacacttgttcactcttaatgtccaatgccacgcactccataacttctcattaaactcgtaccttgtttcacctactcccaaatttaccgctccacttgcaagcgctctatcaccctctactttccgtttgttacattactttctcatcacgtatgacttctttacccaccaaactctaaat

SEQ ID NO: 2766 - DNA, 351 bp, Lilium asiatic
  modified_base (23)..(23): a, c, g, t, unknown, or other
  modified_base (39)..(40): a, c, g, t, unknown, or other
acggctcaagacactctccaggngcgagcagaggcaaannccctagctcaacttgggaagtacgggggtgagggaaagtctgcggacgctaaagaaggcatgttcgtgaagaactacagctactaaggatccacgattgaaagatgatcaaattttaaacaaacttttttgaatgttgctggatcagaatatgttgaatgattataaggttatggatgtaatggagtggcattaggccaatccgtatcgattgttaaatgcacttggttatcgcatgatgttgttactatgacatttggtagattcatctaaagtttcgctagttttaaaaaaaaagcaacatccgaaagg

SEQ ID NO: 2767 - DNA, 243 bp, Lilium asiatic
gctaaatgatgagtatctatcatcacacatggagaggtttcatcatatattcaagaaatttcctagtccacctattgattcaatccattccagaaagattcattcataaccaccttattctacttcataaaaatccatcaccttatggctttctaaccaagtcactgaaaattataaccaccttattctgtttaataaaaatcccacaccttattgttttaaaacatgtcactgaaatttaca

SEQ ID NO: 2768 - DNA, 53 bp, Lilium asiatic
cggacgcgtgggttttttttttttttttttttttttttttttttttactaggg

SEQ ID NO: 2769 - DNA, 378 bp, Lilium asiatic
tcgcccacgcgttcgcccacgcgtccgtacggctgcgagaagacgacagaaggggggcgcgggtgaggtagaacccttccacggtggtgactgcgcgatgggtgcctacaagtatgtttcagagctatggcgcatgaagcagtctgatgtcatgcgcttcttgcagcgggtgaggtgctgggagtataggcagcaaccttccattgttcgcttgacaaggtcgacccgccctgacaaggctcgtcgcttgggcttcaaggctaagcagggctatgtgatataccgtgttcgtgttaggaggggtggccgaaagaggccagttcccaaaggtattgtttatgggaagcccacaaaccaaggtgttacccaactgaaatt

SEQ ID NO: 2770 - DNA, 323 bp, Lilium asiatic
gatttgttccggctggaagctcctgacgtgtaagaagcggtggctcaagcgggggaagctggggctttgctcgatggttagatcccttaagattattggccatgcaatggctgctttgtttggaaagtgaaagattccgttgggtttgtctgggttataactttttcttggaaaggtgggtttcaaacttaagtcaaaggcttatgatggttcctttttgtggatcaagcccgctatatttgtaaggtttaatcctgcaatttggtctgcttgcttgtttaaaggattggtattaatttgcttttatttggttaatttacttt

SEQ ID NO: 2771 - DNA, 472 bp, Lilium asiatic
  modified_base (456)..(456): a, c, g, t, unknown, or other
tacttctcttacatcaccaccatctctctctccctctgaaagatgaagattctctccatcaccttggctctgcttctgctcctcataacttcctccttcctcgaatcagccatggctggtccgcctgtccccgcagggttctgtgataataagtgcggcgttcggtgctccaaggccgggaagcagtcacgttgcctcaggtactgtatgatgtgctgcaatgattgtggctgcgtgccgtcggggacttacgggaacaaggacgagtgcccgtgctacagggacattgtctggggtcccctcaggaagccaaagtgcccgtgattatgcgagctatggttgttctatgtagtttagtttgagttgcttggctctcaataatgaggggacgatagagtgctcgctctcatatcctctctggttgttttgtatcagatcagctggtgttgtgggatntttttttctttttctc

SEQ ID NO: 2772 - DNA, 433 bp, Lilium asiatic
tacggctgcgagaagacgacagaagggggagaaagttcagtataaaaatgttattttcggagtttgggatgttggaggacaagagaaactaaggccactttggaggcactattttaacaacacagatggcctgatttatgttgttgatagcttggatcgtgagagaataggtaaagcaaagcaggaatttcagacaatcataaatgacccatttatgctcaatagtgtcatcttggtgtttgccaacaaacaagacctgagaggggcgatgacgccaatggaagtatgtgaaggactaggtctctttgatctaaagaatagaaaatggcacatacattgcacttgtgcactcaagggaaatggtctttatgagggccttggctggttggctttaacacttgaagaagaaaagctgctggatactcttcaatag

SEQ ID NO: 2773 - DNA, 421 bp, Lilium asiatic
tacggctgcgagaagacgacagaaggggattgagagaaagagagagagggtgtgagtggggcccttttgcttgatccgtcatttgtcaagataagattaagagggtacatatcttagtggtgatttgatacacaagaagaatgttgggtcgggctgcatttttctgaactgggagtttcaggcctgagaatttatgtcataatgccatggccatgattgggaacgtttgcttctcattttttgttattggggttttggttttcaccattatggctgccacttatgaacctgatgatcccttatttcacccttcaaccaagatcaccggattccttactttcaaatccaatgcaactttcaagtctgataacagtgttgtgagaactggggaagatttcatggctgctaatgaaactgcgtt

SEQ ID NO: 2774 - DNA, 292 bp, Lilium asiatic
aagcgcaccatccagttgtgactgggccctactggattaagtgtggattaactatcagccgcctactgtggttccgggtggtgaccttggcaaagttcaaaaggcagtttgcatgatctccaactttaccaatggtgcccaaggggtctctcgcattgatcataagtttgatctgatgtatgcaaagcgtgcttttggtcattggtatgttggtgaaggtattgaagaaggtgagttttcagaggctcgtgaagatattgctgcactggagaaggattaccaggaggttggt

SEQ ID NO: 2775 - DNA, 433 bp, Lilium asiatic
aagcgattatccactagtcctgaaggtcggaaatcgacttcgcctgttactccttgtagtataggcaatgaagcggggacttcagacactaacagcagcagtggattggagaggcttccgagcggtggaaagcagtttgatagtgtgaccagtaccaagttgaatattgtggagagtgaccgatttatcggaactggagtctttgaagagatagagtcgagtgttgcttcaggtgtgtcgatgaatgtactcaatggagtgaaagcagaaactgcaccgaaaccggttatcaggttgagcttgacaacttcggcatgagagtttggtgtcagtgatggatttaatcggcgaaatgggtaagtttttactggattgcaagttgaaggattgaagatgaggcgatccctaaaactttgcgagctgtgtacagtag

SEQ ID NO: 2776 - DNA, 398 bp, Lilium asiatic
taacatggcaattaatagagtggaaatcattgatgaaaatctgaaatgctacaaattttgttgcttatagaagaggaaaaagatatgccaaagggtgagtcattctgttttctcagcatcagcatatagcacaccacatttctttggatctatgcttcagttaccacaggcacttttttatattcttctacacccttggtattgattctccaagaaagaatgctgcaaccgccaaactgttgttgcaaatggataattgcagcaaacatcaggcttaccaaaggaatgattatatcccaagcagtggagtaatagtctgcaatctcatcctcatataaggatgaaccatcaacatatacaagagcctcaaagagatcatatgcatgaggaattagtct

SEQ ID NO: 2777 - DNA, 440 bp, Lilium asiatic
gcgtccgcccacgcctccgtacagctgcgagaatacgattgaagggggagcaagagtgaagagcgaagagaatggctcccaagggctgaatctttttggctgtgttatgcttctcagcactgtcactgagtcgttgtcttgcggaggataatggacttgttatgaacttctacaaggaatcatgccctcaggctgaagacatcatcaaagaacaagtcaagcttctctacaagcgccacaagaacactgctttctcctggctcagaaacatcttccatgactgtgctgttcagagttgtgatgcttcactgttgctggactccacaagaaggagcttgtctgagaaggaaacagatcgaagctttgggttgagaaatttcaggtacattgagaccatcaaagaagctttggaaagggaatgcccaggagttgtttcctgt

SEQ ID NO: 2778 - DNA, 447 bp, Lilium asiatic
  modified_base (12)..(12): a, c, g, t, unknown, or other
tacggcttctanaagaccacagaaggttgtgtttaatggagggtccttaattctacggccctgtcttctttctatgctttcaaccaaattctcaaatcactcttcttcttcacccttctgatctgctaattctcaaagtattcaaaattgaatggttttcaattgaactataatatccaaaccactgctacacataacgcaaaatgaaagtcaaaacaatgtcactttgatgtcttcttcctcaaccaccatttaaagtgtgttcctgaatacctcaaaactgaaagagcgcaactacatcggtttatctaattcatcatctattgacaactccctgccgtccttctcagattagactaatatcaatctgaaccttaacgctactgaactcaaacttccaccttcaacagtctcaatcttcctaacaagattcacatcttttcttca

SEQ ID NO: 2779 - DNA, 384 bp, Lilium asiatic
  modified_base (10)..(10): a, c, g, t, unknown, or other
  modified_base (51)..(51): a, c, g, t, unknown, or other
tacggctgcnaaaatactacagaaggttatttttaaagggttcagaaaaanccccgcgcgggggaaattctagtggaagaatctcattaatcactacaaggtaaaatacacatcttacccagatcatgtctagcaatgtccattttttgaacaattgcataccgtctttacccaaagggcacataatatgcaacgattacttctttaatctcaaactcgttcaactcaaaccaacaaatgcattaacacgatcaattggatatctttcatcacaggaactctcacaagatttctatgatcttcaatattatactgaaaattataaaacttccactaaaccatactttttttaggaaagtttaccaacttgcagtgcaaaaatct

SEQ ID NO: 2780 - DNA, 273 bp, Lilium asiatic
  modified_base (11)..(11): a, c, g, t, unknown, or other
ggctaccatantattacacaacatcatttatttttggttattcctggacacctacacgccggaatcttcaactagtctactcccttaacttttttgatttaactctaccgattgtacctattccatcatagtacataagccatttcacactaccactatacattgcataatattgacttaccaaactacactatattttcaacccattctccatttccttaatccaaaccgactagtcacatctacatcatctttttattcacaataaccctc

SEQ ID NO: 2781 - DNA, 306 bp, Lilium asiatic
aagcgcaccatccagtttgttgactggtgccctactggatttaagtgtggtattaactatgagccgcctactgtggttccgggtggtgaccttgccaaagttcacagggcagtttgcatgatctccaactctaccagtgttgccgaggtgttctctcgcattgatcataagtttgatctgatgtatgcaaagcgtgcttttgatcattggtatgttggtgaaggtatggaagatggtgagttttcagaggctcgcgaagatcttgctgcactggagaaagattacgaggaggttggtgctgattct

SEQ ID NO: 2782 - DNA, 246 bp, Lilium asiatic
actctttttctatttttaatatttttttgtttaattttattttttttaattatttttttttttttattaacatttttttattccattattctaaatcctaatatctccaactttcatttactttaaacattttcttaaaattattaaaaaaacccaaaataaataaaaacccacattacattaaaatatatactaacaacattaacataatcttaacataaactataacaaatctaacaaaccaaa

SEQ ID NO: 2783 - DNA, 297 bp, Lilium asiatic
cggacgcgtgggggaggatgaggatgatgagtagagaccagtgtgttgaaggagaagatttgcactgaactggaggtttttctttttttgtttaagctgtttttgatgttttctgttgggatgggagaacgaacagaagtagtgttagcattatctttgtagtcttggcattactattggtctttatgcatatgagatcgaaagtggtggtgagactctccctaactgccttgtagtaactctttgctttactctcttgttcatcaatggggatatgtatttagtttcctgaactaa

SEQ ID NO: 2784 - DNA, 219 bp, Lilium asiatic
cccagaagaccgtcctgctcccggagcaccttcgaagctcccatctcgtcacctacggagaggctgattgacttcccgcatgcatccattccaatgaaatgttggtagcctcatcctccgctgcagcatacgcgtacttcacaatccattgctatggtctgactctcagaggttctttacgacaaggtgacctatttattgcggatccttgggcttgca

SEQ ID NO: 2785 - DNA, 261 bp, Lilium asiatic
catcaaagacagtactctacactaaatattcagcacaagaaatgaatgttgctacatgacaccataagtgacaatattcaacttattgaaggagcttacaactcactctatatctgaggggcacacaccacatatatatgaagtgcgcatttatgctgaacactttagtgaaaaatgtgccgcataaaactagcgctcaatttgagaatcttatagaaggtggggtctccctgcctgaaaaaggatggtggaacagaaaca

SEQ ID NO: 2786 - DNA, 428 bp, Lilium asiatic
aaaacagagagttgatacagaaaagacaaggcaccaatttgtcgtcacttcagatgtgcgacgccagattctgctgatgaaccagaaggcgaagcaggattggaataaaaggcaggctgaggaggctgaaaagctccgaaggattaatgaatctgaggggaactcaggagctgaaaccgaaaaggagaaggatgaaaatcgttcaaagactgtcaaggttaatagggaagaggatgacaaattgcgaacaacagcagcaaacgtcgaagcccgcgctgctgtcgggggatatcacatgctctcaaagtggcatctcatggcggcacaagctccacaaacgcgtcacggactcgatgtcgtctcgacttcccaaccaagcaaatgttgaaaccgaaagactctaccaaccttctataaaagtttaagag

SEQ ID NO: 2787 - DNA, 297 bp, Lilium asiatic
tcacgcacaagcatctctctccattatagttagcttctgaaggtagaatgtgacaatgggcaacttgtctacatctttactgtgctatgaatcttcacaaaccacaaaaccattaaggtagaggtcatactaattactgaaagaattactccataatgtatttacaatataaaacatgtttcaagaaatttctctatccctacatagtaccacttgacaaacatttccatacctatcttattcaagtcattcaaattagtccttagatatttccaattgaatatcctttaaaactat

SEQ ID NO: 2788 - DNA, 424 bp, Lilium asiatic
tcacgcacaagcatctctctccattatatttaggtactgaaggtaaaatctgacaatgggcaacttggctacatctttactgtgctatgaagcttcacaaaccacagaaccgggaagggagagggcatacaaattacagaaagaattactccataatgtatttacaatataaaacatgtttcaagaaatttctctagccctggattgagccactgcacaacattttccatagctctcttagtcaagccattcaaattggcctaggatatttccactgaagttccttcaaaactctcacctaagaggcttcaaacccttggatgttctcagctcatttactgccattcgtagagaatcatccgacaatattaatcttgatagagcacccgtgcttagccccagtattggcgctgcctttgatact

SEQ ID NO: 2789 - DNA, 334 bp, Lilium asiatic
gcaaactcttgctcacttggatcaatcactttagactctgggatccaaactagagctcagggaaacctacagggctgtcgcggctctcacggaaagcgtaaatgtcattcaagctacaatggaagtgaataaccatctgaatgatctttttttacttgaacgagatcacaacataaattgaaaaactaatggtacaaggcatatcaacaacaaaattacaaagtacgatctgtagtaagagccaatactagtttataattagagtggacttgcattcactacctataatgccatcatgaagaaatgcttgcacattctaaatgatattgttaaa

SEQ ID NO: 2790 - DNA, 371 bp, Lilium asiatic
aagcactgagtgtcctgcgaaccgtgagcctcaggattgaaaagtggtggagagaggaggggcgccatgaaggcatggagctcccagatattgcatcttctttctcagacaaaatctcagaggagatatgcaattcagccgcaaaaatggctaataatttgggagtggatgctgtgtttgtctacacgaagagtggtcacatggcctcgatcctttcgcgttgccgccctgactgcccgatctttgcattcactacctcgacgtccgtgaggagaaggctgaatctccagtggggccttataccctttcggctgagcttctcagatgatatggatagcaatctgtatcggacttttgctttactcaaagca

SEQ ID NO: 2791 - DNA, 153 bp, Lilium asiatic
taccggtttcggaattggccggtgggacgccacgcgtccgtacggcgtgctgagatagacgacatgaaggggtgttgttcttctagaagaagaatttttgggttttggggtatcattcatgggggtggggttgtagcactatgtatttgcaag

SEQ ID NO: 2792 - DNA, 373 bp, Lilium asiatic
tacggacttgctctcatggaactgcttgcaacttcattcactgcttccgcaacccagggggcgattatgaatgggctgattgggataatcctccacctaaatactggatgaagaaaatggcctttctgtttggtcctgatgaagctgggtatgaggaacaaatgaaactggaagagcgcgagaggccttgggattccaacaggaaatcgacaccgacaaactacaggacctctaagggattagctccgggtgcaaatgagcaagttatagtatgttgtaatggcggtctatacgctgtgtagactacatcaaccgtggaatcatatgcagtgggagagacatcacttctaaaaataccatgagatcacaagga

SEQ ID NO: 2793 - DNA, 277 bp, Lilium asiatic
  modified_base (5)..(5): a, c, g, t, unknown, or other
  modified_base (75)..(75): a, c, g, t, unknown, or other
cgggncggccgacgcgtacgcttaaaaacaggatgatcatttataacgaggtaattccacttactggaaagacanctaacaggacaaatcctcacgcttttaacaccactgctcaaaagcaaaaggcacctgatactgatagcaagcctgcatcatcagttatcgtctctgtactagctgatcacactgaggctgacaatggtgatggtgatccaagagtatcaccaaaacccctcttcaggatatttgaccgcgttctgctcgatggagtcaaata

SEQ ID NO: 2794 - DNA, 128 bp, Lilium asiatic
  modified_base (5)..(7): a, c, g, t, unknown, or other
  modified_base (13)..(13): a, c, g, t, unknown, or other
  modified_base (22)..(22): a, c, g, t, unknown, or other
  modified_base (26)..(26): a, c, g, t, unknown, or other
  modified_base (29)..(29): a, c, g, t, unknown, or other
  modified_base (40)..(40): a, c, g, t, unknown, or other
  modified_base (42)..(42): a, c, g, t, unknown, or other
  modified_base (49)..(49): a, c, g, t, unknown, or other
  modified_base (57)..(57): a, c, g, t, unknown, or other
  modified_base (78)..(78): a, c, g, t, unknown, or other
  modified_base (81)..(81): a, c, g, t, unknown, or other
  modified_base (85)..(85): a, c, g, t, unknown, or other
  modified_base (87)..(88): a, c, g, t, unknown, or other
  modified_base (106)..(107): a, c, g, t, unknown, or other
ggaannnccgggncgacgagcncacnagncggcggccgcncnagagganccaagccnacggacgcccccacgcgacgncanagcncnnggagaggggcaccaaaanncaaggcaccggccgacgcaaa

SEQ ID NO: 2795 - DNA, 93 bp, Lilium asiatic
  modified_base (7)..(7): a, c, g, t, unknown, or other
  modified_base (16)..(16): a, c, g, t, unknown, or other
ccgggcnggagaggangcaagacgacgcacgcgtgcatgcaacatcataactcttctatagttttacctaaattcaatttagtggccatttgg

SEQ ID NO: 2796 - DNA, 296 bp, Lilium asiatic
ggcggttgatataaacacactgagtttccaaataagggatccccaaaaactatcacaccctcacataaaaagattccgttcaacaataaaataaaatattaatataaacaacaacaacagtcacaaatcatatagaatcccataaacaactcccccaaacatgaacaaaattaagatcttaactgcggcagcgggtgatggcagagcagcctcgggtgtaggggttgacgcgggcgccggggcggcagttgtagtatgagaggccgcggcgggagcacggagtggtgtcgcgcctc

SEQ ID NO: 2797 - DNA, 277 bp, Lilium asiatic
ggcggttgatataaacacactcggtttccaaataaggaatccccaaaaactatcacaccctcacataaaaagattccgttcaacaataaaataaaatattaatataaacaacaacaacagtcacaaatcatatagaatcccataaacaactcccccaaacatgaacaaaattaagatcttaactgcggcagcgggtgatggcagagcaacctcgggtgtaggggttgacgcgggcgccggggcggcagttgtattatgagaggccgcggcgggagca

SEQ ID NO: 2798 - DNA, 197 bp, Lilium asiatic
  modified_base (11)..(11): a, c, g, t, unknown, or other
cttcaatggcnatctacctccgatccctcgccgccgccttcctcctcctcggccgttgcctctacgcgaagtccatgtccgactcctcctcactgtaatccattgccacgtctttccacgacgtcctcccccagtacggcctccccaagggcctccttcccaactccgtgaagagttactccctcagctgcaactgc

SEQ ID NO: 2799 - DNA, 331 bp, Lilium asiatic
  modified_base (11)..(11): a, c, g, t, unknown, or other
  modified_base (56)..(56): a, c, g, t, unknown, or other
  modified_base (59)..(59): a, c, g, t, unknown, or other
  modified_base (84)..(84): a, c, g, t, unknown, or other
  modified_base (89)..(90): a, c, g, t, unknown, or other
  modified_base (95)..(95): a, c, g, t, unknown, or other
cgatggcgtcncatcagactgcgaggggcgaggatttcgagaagaaggcggggaanaancccggcggatggggccgctttccanccaannaccangacgccgccgaactctacgacaaggccgccaattgtttcaagctcgccaagaactgggagagagcggcagctgtttacattaaactggctggaattcatatcaagctggagagcaagcatgatgcggcttctgcttatattgatgctgctaattgttacaagaagtactcaaactcatattccgcacgagccctaaatgaagctgtaaatctttttctggagattggcaaactaaa

SEQ ID NO: 2800 - DNA, 343 bp, Lilium asiatic
cccccacagacccaaacaagcgcattttccacccctacggctccgccgccggcctcttcgtgcaaatgggtgcctgccgcggcggcgccgcctccttctccatcatcggcctcgcatccaaacccacccacctcttctccaaaccctggttcaaatgcgagtacgtctccaacccccctcaaaatttaggacactaaacaataatttactatcccttagaatctgaagctggtgcttgtctcaattttagagagcccaaacattattatcatggttgatgggattatgaagtagtctatatacattatttagatggatatctgcagagggaagttctttaaat

SEQ ID NO: 2801 - DNA, 362 bp, Lilium asiatic
aaagaatctgtgcaggttggcctctcagagaggaaggcatctgatgaaaataccgtcgctgtggtagctggcaacccaccgaaggtctcaaggccagtacctgagaagcatattcttacaaatggtgtcgccaaatgttggtaaggcagccaccgtagcaaggattaaaagaggggggcaacaatagggggaaataaaggcctggctaaggtagtggtggtaatgaatttcctttaatcttttaaccttttccggggttgaagaaaggagtttggtggtggtttggttttcaagaggaacttggcaatctggttttctaagtaatctaaaaaaaatatatcccaaaccttctctggcgaaaa

SEQ ID NO: 2802 - DNA, 66 bp, Lilium asiatic
gatccaatcttacttactcatgcatgctacatcatttctcttctatagcgtcacctaaagtcaatt

SEQ ID NO: 2803 - DNA, 277 bp, Lilium asiatic
gcgatgcaggtgaatcatgttaatcgtagtaattgccattgccattgattgatatgtgaacaattgattgtgtaatcttaatatacacttcctccctcatcttagaagagaattttattaattgtgatagtctcacattagaaggggtaaatttaatttgaattttattaagcaaaaaaagaataagacaatgctacatatcataaactcaatttacacttttttcaaatactcatttataaaagatatcttaaggggcggccgctttagaggatcc

SEQ ID NO: 2804 - DNA, 403 bp, Lilium asiatic
agagcaggtctcatgaacttgatgttcgccaaaatcctaattttgtacaatcgaaaatatttgccgccagtcattgtagacactttgtgacgtattatttgaagacaaagaaggcatcaaaataactcgtacataacttaggaatacagatacacataaattacttgtcttgcagcaaacaactaaatcaacaattaatagaggaagggggaccaagaattcatgaatcaccatacacatagtaagttcccaaaaaaaggttgggccttttatctgttagctgacgagcccactggacccgtccggtccaatttgcacccggccactacacatatactcccatagtacaccccatctcttctgcctctgatgtgccaattgtcatcctgaggatgaaaccttg

SEQ ID NO: 2805 - DNA, 222 bp, Lilium asiatic
cacggggctaccagtgatatcccgctggactcgatgagcgatggcaaggcgaacgatagggagttggcgacctgggaagcggatctgactaggacagagcgggatatcataaggagagaagaagctgtgactaacgctggtgtgccggtggaagagaataactggcccccgtgcttcccgatcattcaccatgatatacctaacgagatgccgatccatgct

SEQ ID NO: 2806 - DNA, 290 bp, Lilium asiatic
tatttatgtatattaacgatatatccagaagcgcagaattcatttatcttcttaagctccttgaaacactcaagtatcatatgagaaagagagggagagagagaggggaagatactacccaaccaactgggtatcttcttaggctgcttgaaacactgaagtttcatattatagaaagagagagagagagaggggaacatactacagaaccgactgcttatcatgtcttgaaaaatacagacttaacaaaattgtgagaacccactttacttggctactgacacaaacag

SEQ ID NO: 2807 - DNA, 301 bp, Lilium asiatic
ggcaaatgaaatatctattccataaagttaggcaaataagggtgtccaacaccaaggatcaaaggacaatatccaaaattactaccactattaatctaacaacacatttttcttaaaaaacaaaaggtccaaaccccttaccaaaataaacatccaaccttaaaattacccccggaaaaggcacacaaaaaccttaaaaaacctttcctgaattaactttttcaacaactaataccttttatgaaggggccttttaagaacaacaaccagcaccattaattaatccggcctgttaaggggg

SEQ ID NO: 2808 - DNA, 424 bp, Lilium asiatic
aaaaaaaaaaaaaaaaaaaataaaaataaaattaaaaaaaaaaaaaaaaaaaaaaaaaaaagggaaaaaaaacaaaaaaaaaagaaaaaaacaaaaaaaaaggcggctcctttttatataaaccaaacatttctaaaaccttacaaacatgggggggccctttttatgggccccacttttttttccccggccttccccgttttaactttttttttggggcccccaatttgattttcccgggccgtgtttttccccccttggccttggaaacccctggcctttccccattttaattgctttggacccatcccccttttccccggtggggttaattgcaagggggccggctcctttccctttttcaaaatttttccccccttttttggatattggccccccccttgttcggctcctttaaccccgg

SEQ ID NO: 2809 - DNA, 338 bp, Lilium asiatic
cacggcgctactgctgatatcccgctggactcgatgagcgatggcaaggcgaaggagagggagttggcgacctgggaagcggatctgaagaggagagagcaggatatcagaaggagagaagaagctgtaactaacgctggtgtgccggtggaggagaagaactggcccccgttcttcccgatcattcaccatgatatagctaaggagatcccgatccatgctcagaggctgcagtatctggcgtttgcgagttggctgggtattgttatttgtcttatgtggaatgttattgctgtgaccctcttgtggattagaggcggaggtgttaaaatcttttt

SEQ ID NO: 2810 - DNA, 265 bp, Lilium asiatic
aaaagctccccccccctggataaagaatattttgttacaagacctttgtccttttaggggaaccaaaaaaccccaccataaatcctcgtgaggaaaaaaaatccttttttttctaaaaagctcaagggaaataatgctactccccacaacattttgaaacataaacccagggggtttttttttacttccccccccccaaatcaaacgaacccctttgggtttttggggctggggtttatatctgggggcggggagggggggcccc

SEQ ID NO: 2811 - DNA, 359 bp, Lilium asiatic
  modified_base (351)..(351): a, c, g, t, unknown, or other
taccaacccaaacactataaaatccaaatccaaaaatcgcccaaatctggtagcaaagcgaagcagctcgatctcgtcatggatcccaatcagggcaccgccgagaactacgctaatccgaagacgtgcctctttcacgtcctcttcaaggctgcggcgttggcgttctacgtgctgtcagcgctcttcttcaacagcttcgtgatcatcttcgtggtcaccgtgcttctcgcggcgctcgatttctgggttgtgaagaatgttagcgggaggatactagttgggctgaggtggtggaatgaaatcgatgaacaaggggagagtatttggaagtttgagtgcttggatcangagtcact

SEQ ID NO: 2812 - DNA, 300 bp, Lilium asiatic
ttcaataaccatctcacttatttgccataactaaacggattacatactaattaaatccttaaacatcttaagacactcaactgaaataaatcattaaacatcccacgactcttgttactagatggcacggaccttaatgggcaagcccttggggaatccgaggaatgggaatgaaacaggatagtctttctcagctagctcaaaatgatatttcaggacgagatggtgaaggaagacggccatctccagcttcgctagctcagcgcctggacagagtcgaggtcctccgctgaatgacat

SEQ ID NO: 2813 - DNA, 152 bp, Lilium asiatic
gcgcgcaaaaaatatatatgaacttgatttttgtctcgagttttagcatgatggtaagtaggagatactttggggttgacttcttgtgcagttatacatacactgtttgtgctgtgaatgaaccttacaagacttcgtgtgctgtgtaataa

SEQ ID NO: 2814 - DNA, 224 bp, Lilium asiatic
  modified_base (185)..(185): a, c, g, t, unknown, or other
  modified_base (195)..(195): a, c, g, t, unknown, or other
ggtgatgcatcaaacataaccttaatgaaatttaaaaaactaaagaatcacatccttagatcatcaataagttgtgattcaccagaaaaacaaattttaagaaaggatagtttaagacaattgaaaactattgtaaggtggcaataagtttttttttttggagggtggagagggagagaggcggnggggtgtggntctgttttttctttgttgctttctttcta

SEQ ID NO: 2815 - DNA, 61 bp, Lilium asiatic
aacaaaaaaaaaacaaacacatcaacagaatacaacaaaaaagaacccaagagaaaagggc

SEQ ID NO: 2816 - DNA, 376 bp, Lilium asiatic
  modified_base (37)..(37): a, c, g, t, unknown, or other
caataattccaccctactttatccaacagtttttcgnatcattcattttacggggttcaggggtgcttctacaacaatcatcagccctattacagcagttaccttaggtgcatttattggcacaaaacatcagggcacaacaactacaacaactcgtgcttgcaaaccttgctgcctactctcagcatcagcatttacctttgttgcatttgatggcacaaaacatcagggcacaacaactacatcaactcgtgctagcaaaccttgctgcctactctcagcaacaacagtttctgccattcaaccaactagctgcattgaactctgctgcttatttgcagcaacaacaactactaccattcaaccagatagctac

SEQ ID NO: 2817 - DNA, 150 bp, Lilium asiatic
caacaacccatcattggtggtgccctcttatatatttcttatgagttataggggaataatgaagttttttatctgatgcttgtggcttcccagaaataagaaagtacatttctagaaaaaaaaaaaaaataaaaaaaaaataaaactaaa

SEQ ID NO: 2818 - DNA, 138 bp, Lilium asiatic
ggacaaagtacagtttaagtgtgggggagaataacttaagtatttttatcatttataaggagagataaaatgaaactttattaaaacgaaaatcccaaacaccaaaagtttataacaaaaaaaaaaaaaaataaaaat

SEQ ID NO: 2819 - DNA, 445 bp, Lilium asiatic
tatctagcaacataaaaagcacactagcgtatcaacaatggcagccaaaagggggcgcttgcttatcctccttggactttctgcacagcttactacctcaaccattattccacaatactcacaagctcttataacttcccattttcacccatacctattaccagccgcttatttactgttgttaaacccaattgtttaaccctacaagatccaactgtcaatagcaacaatcatcttaccattatcagcctctttcctccaacaaccttcttaccgattacagtctttactcttatttccattaactggctcaataaaatcttttacatcaactacaacatctcttgcttatatactcttgctgcatactcttaaacatcatcaccattgtaacattcaaccaatctttctcattgaactcttctttttaaatgcatcaacaatt

SEQ ID NO: 2820 - DNA, 236 bp, Lilium asiatic
gggacttataggtgcagttttttgatagttttcatcctaaggattcatcaaaccaaattatgtgagaacctttcatatcattaaactgaccgtcaccacccttatatacaaggttctttctcttttttatcattcacataaccacaaaatttctcatcttttttggcattgcacattaaatccacatttatcacaaaatttaccctcaataatattaaccattttgtccccaaatt

SEQ ID NO: 2821 - DNA, 425 bp, Lilium asiatic
ctgtgtggaacatgggcaacgcctactggtttatgagtacgttggaaatgggacactgcaggacatgcgacacttttctgatgatagcactaagatgcttacctggaatgcacgtgttagggtggcacttggcactgctagggctcttgagtatctgcacgaagtgtgcttgcctcctgttgtacatagaaacttcaagtcagctaatattctactcgatgaagagctcaatcctcatttatcggactgtgggctagctgcattagcaccgaacacagagagacaggtgtcaaccgagatggttggttcattcggttacagtgcgccagaatttgccatgtccggagtttacactgtaaagagtgatgtatacagctttggagtagtgatgttagagatattgactgttcgaaagcccttagaca

SEQ ID NO: 2822 - DNA, 323 bp, Lilium asiatic
aaaaacagtcactactgagctggaattcatagatttatacaaagaattgcataggcatgaatttccaaaaaaaaaagatagaggggagttcccttgtattgtatacttacacaagtactaaatataagtatacagggctttcttgttttgcataattatacatcacatattcactgctcatggaaaaaagacctcttcaaatacgcagcttcttcccgggctgtgcatcctcgttctgccacccataatcggctattccgtcatctttatttccctttctttcttgcaatgatcttgtttatcttgtgcagcttaatttgtaa

SEQ ID NO: 2823 - DNA, 392 bp, Lilium asiatic
  modified_base (298)..(298): a, c, g, t, unknown, or other
atttcttgctacgcccagtcttgaacttcgaacgtactttggtttgggccgaaaatataacttctctaaaatagactgctagatattttgtatttccgggtgcctctttgatatcttggaagagcaagaagcaagattgtgtatctctttccagtattgacatagagtatcgagctatttccttgatgaccaaaaagattgttcacctccgatgtctcattgttaatattggcgtactcgttcagccattggctcctctcttctaagacaacaagagtatcattcaaattgcttgcanactaatatttaaacatataaatatagatcattttgtcaagtaacactttcttctaaagagtttatgaattcctcgcatctcctttgcaaacata

SEQ ID NO: 2824 - DNA, 213 bp, Lilium asiatic
cccacgcgtccgcccacgcgtgcgcttttatccgttagatctgattgactgctttgggccaaatctcacatctatgatggacttcagatttcatgtcctccgatttgttcttaattggacaagatatgctgagagatccttgggaatcatacttgacaggacttcatcaatgtgtggctgttctgttagcgggcgcccgggcgatataaactt

SEQ ID NO: 2825 - DNA, 389 bp, Lilium asiatic
aaaaaaaaaaaaaaaaaaaaaaaaaaaaaaaaaaaaaaaaaaaaaaaaaaaaaaaaagggaaaaaaaaaaaaaaaaaaaaaaaaaaaaaaaaaaaaaaaaaaaaaaaaaaaaaaaaaaaaaaaaaaaaaaaaaaaggggggggccgttttaaaggatcaaagtttacttccgcgtgattgcaaagtaatattttttttttggggccactaaaattaaattaatgggcgggggtttaaaaacggggggatgggaaaaaccttggggtaaccaaattaaatggtttggaaaaaaatccccttttggcaagttggcgtaataacaaaaaggcccgaacaatttgccttttaaaaagttggccaccttaaatggaaattggaacccccctttt

SEQ ID NO: 2826 - DNA, 213 bp, Lilium asiatic
  modified_base (8)..(8): a, c, g, t, unknown, or other
  modified_base (25)..(25): a, c, g, t, unknown, or other
  modified_base (35)..(36): a, c, g, t, unknown, or other
  modified_base (54)..(54): a, c, g, t, unknown, or other
  modified_base (70)..(70): a, c, g, t, unknown, or other
  modified_base (79)..(79): a, c, g, t, unknown, or other
  modified_base (84)..(84): a, c, g, t, unknown, or other
  modified_base (105)..(105): a, c, g, t, unknown, or other
  modified_base (108)..(108): a, c, g, t, unknown, or other
  modified_base (128)..(128): a, c, g, t, unknown, or other
  modified_base (135)..(135): a, c, g, t, unknown, or other
  modified_base (159)..(159): a, c, g, t, unknown, or other
  modified_base (170)..(170): a, c, g, t, unknown, or other
  modified_base (180)..(180): a, c, g, t, unknown, or other
  modified_base (208)..(208): a, c, g, t, unknown, or other
gcgaaacncgcccgggaaccgggcnggcaagacannaagggcgccgaggacgcngacaacgaagcgcggnaacgggcanacaanaaccccaaaacaggaagccanaangacggaacaagaaaaaaccnccgccgngggggaagagaccagggaggccgnggacaccacgncacaacccgncgcaacagaaaaaaagaggaagaacaanaccgc

SEQ ID NO: 2827 - DNA, 260 bp, Lilium asiatic
  modified_base (5)..(5): a, c, g, t, unknown, or other
  modified_base (31)..(31): a, c, g, t, unknown, or other
  modified_base (34)..(34): a, c, g, t, unknown, or other
  modified_base (38)..(38): a, c, g, t, unknown, or other
  modified_base (46)..(46): a, c, g, t, unknown, or other
  modified_base (88)..(88): a, c, g, t, unknown, or other
  modified_base (132)..(132): a, c, g, t, unknown, or other
  modified_base (184)..(184): a, c, g, t, unknown, or other
ccggnccggaaaacccgggacgacaaaaggncgncagngagcgcanggcgaaacccgcccgggaacagggcaggcaagacaaaaaggncggcgaggacgcagacaacgaggcagcgacacgggcagaacaanaacgcccaaaacaggaagccaaaaggacggaacaagaaaaaaccaccgacgnggcggaagagaccagggaggccgaggacaccacgacacaaccggacgcaacagaaaaaaagagcaagaacaagacc

SEQ ID NO: 2828 - DNA, 371 bp, Lilium asiatic
gcctcatctacgaggagacccgtggggtgctgaagatctttctggagaatgtcattcgcgaggccgtgacctacaccgagcacgcccgccggaagacggtgacggcgatggatgtggtgtatgcgctgaagaggcaggggaggacgctgtacggcttcggcggctgatgggtttggtcttctgcaagctttagtggtgctcgtgtctggtgtctatttccttatgctgtcgagtgttaatcctagtaggacttctgttatgtttcctgtaaaatcatcagatttctcatctgatattgaattggaagaagtttagagttatgttcttgtgtgttcacgtctgttatgagatgtttcgtttctctttggtaa

SEQ ID NO: 2829 - DNA, 168 bp, Lilium asiatic
aaaaaaaaatttaaaaaaaatttttaaaatttttaattagggcccgggaaaaaaatttttaattaaagaattttttttttaagggtttaaatattaaaagggccttaaacttttaatttaaaaatttttttttttttttattttaaaaaatggccaacattgaaaatt

SEQ ID NO: 2830 - DNA, 153 bp, Lilium asiatic
cttgtataatacatcttaagttgtaactcctctggcagttctcttgtataatacatcttaagttgtaacttctcaggtgaaagtattcttggaggcatgtccatatcatgttactacaaacctgtgaagttacaacttaagatgttttattca

SEQ ID NO: 2831 - DNA, 97 bp, Lilium asiatic
ctctctctctctctctctctctctctctctctctctctctctctctctctctctctctctctctctctctctctctctctctctctctctctctctc

SEQ ID NO: 2832 - DNA, 323 bp, Lilium asiatic
aagagtaaagcttgagtgactttggaaaaacttatcagtacacaacttggtaacacataacttaccaataaaaataagaaaaaagaaatgaaaaaactttgcatcaaagcttggaagcacacttgtcagtaaaacatgtcatcaagaatgagaagtggttatagattgtaaatatctttgtaatagcattatattaagaaagttcttgagccttacattgtaaaagtattgaatatgtacatcaataaagagaaattttggtgttggcatactttttatcatactaaaaaaatctttacgagttaaagtttataaaatagggc

SEQ ID NO: 2833 - DNA, 377 bp, Lilium asiatic
tagatttcaagactttccatagctgagatggagaccggatccaaggctaagaagggagctggaggccgaaagggcagcagcggaccaagggccaaatcagtgacccgctccatcaaagctggcctccagttccccgtcggcaggattgggcggtacctcaagaagggccgctatgctcagcgtgttggctctggagctcctgtctaccttgctgccgtccttgagtaccttgctgctgaggttcttgaattggctggtaatgcagctcgggacaacaagaagaaccggattgtacctcggcatgtgtgcctggcggtgagaaatgatgaggagcttggaaggctgttgggtggtgttactattgctcacgggggagt

SEQ ID NO: 2834 - DNA, 298 bp, Lilium asiatic
gggggagccacgcgtccgtagatttcaagactttccatagctgttatggagactttatccaaggctaagaaggggtctgtagggcgaaagggcaggagcgtaccaagggccaaatcagtgacccgctccatcaaagctggcctccagttccccgtcggcaggattgggcggtacctcaagaagggccgctatgctcagcgcgttggctctggagctcctgtctaccttgctgccgtccttgagtaccttgctgctgaggttcttgaattggctggtaatgcagctcgggacaacaaga

SEQ ID NO: 2835 - DNA, 479 bp, Lilium asiatic
aagccaccatcgatctgcaagtctcgctacgtatcagtgcaatacaaaaaaagcagccgcgatggctagcagcaccatggccctctcctccacggccttcgccggcaaggccgtgaacgtgccgtcgtcgtccgccttcggcgaggcccgcgtgacgatgcgcaagacggcggcgaaggccaagcctgcggcggcgtccgggagcccgtggtacggccccgaccgcgtgctgtacctgggcccactgtccggcgagccaccgagctacctgacgggcgagttcccgggcgactacggctgggacaccgcggggctgtcggcggacccggagacgttcgccaagaaccgggagctggaggtgatccactcccgctgggccatgctgggcgcgctcggctgcgtcttccccgagctgctcgcccgcaacggcgtcaagttcggcgaggccgtgtggttcaaggccggctcccagatcttca

SEQ ID NO: 2836 - DNA, 350 bp, Lilium asiatic
gcttcatcacctttgccatctacgtctacatctacttctccggcgcccgtgcacccaggaagcaatgcctcgggcaatcacaacggtgttgtctggacatttgctgtgggtgggtttgctgcatttgctggtctgataatggtgtacatctcggagtggcacaagtttatttaggttcgtaggattatctatgaaaggttttctgaatgttggtgaagcaatcgatgaattcttgttctcttgttatttgaatggttagttaaggaggtgaagtttttttttgccattcttttttatattctcttttatttttctttttcctttttataagtttttttttttttaaggtc

SEQ ID NO: 2837 - DNA, 391 bp, Lilium asiatic
tagaaaccgtcgtgatgatgagtaatgtttatgggattaatagtatgtaccccacctgcatttccaccctgattctataatcataacacggtgacacagacagtgcaaccgaataaggctgttagtacaaaaacaataggaacaccaaacatagaataccaagctttgaataccatccacctaatttatagggatcaaatactgctgttaagcaggattttgctgcaccttgtgtcgccacatcacggtgatagggtctgggtagaaatatgaagtagaagtgggtacgtgacattactctttttttggacattggtttatttttgtcattgtatgccacaaggacttggaaacatgaacaaatcttgaattccttctacttaggcaaaaa

SEQ ID NO: 2838 - DNA, 241 bp, Lilium asiatic
gacatacatagctttttgttgtattttcattgagactctgtaatggaatcaataatggtgcgtgtgtgcttgctaatgatgattatcatatgtttgagttactactgtgattgcaattctactgaaaatttaaatgtttggttacaaaaagaaaaaaaaaaaaagcttacatatgattaatgggcggccgctatagatgattcaaacttacctacacaggcatgcgacttattagatcttt

SEQ ID NO: 2839 - DNA, 387 bp, Lilium asiatic
cggctcgagcacaaagatgggcgccaaggcgaagggggcggggaagaagcaggtgaagaagggatccaagcagctagccatttcccgtcagccgaatgatgccaaagatttcttgccgctggaagggggtccgctgcggaaaattccggttaaggaagagccggtgaaggatacttgcactgtgttgtatatcggtcacatacctcatgggttttatgaggatcaaatggaaggtttcttcaagcagtttggggcaattaagaggttgaggatagctcgcaataagaagacggggaagtcgaagcactatggtttcattgaatttgtgaatccagaggtagctaacgttgtagctgatgagattgatgggtatctactatttgagca

SEQ ID NO: 2840 - DNA, 420 bp, Lilium asiatic
  modified_base (2)..(2): a, c, g, t, unknown, or other
  modified_base (8)..(8): a, c, g, t, unknown, or other
cnaattcntcaaccgactttttatttaactttttcaaccacccactatacaccagagaaagttcatcattaaacaccctacgcccctcattatattaaatacctcatttcaaacctcaattaagacccccacctccaatcatcaaacttcaattcacatcgtctacctatctgcatactctatcactattccacctttactcgaacaaggttatgacaaactgaacattcttatgttcacgatccctacagaacatgattaataatatcctacgtatgcacaaaactacaataatagttttcactaccatgaactagcatattcatctaacaacacctctaaaaaccagcaatacttctaacactttttcaatcatattcaattcatcaataacactaaccctaatcaaacagttcctta

SEQ ID NO: 2841 - DNA, 70 bp, Lilium asiatic
aaaaaaaaaaaaaaaaaaaaaaaaaaattttaaaaaaaaaaaaaaaaaaaaaaaaaaaaagaaaaattgg

SEQ ID NO: 2842 - DNA, 427 bp, Lilium asiatic
  modified_base (405)..(405): a, c, g, t, unknown, or other
cccacgcgtccgggagtgtagcaggaagtgtgaatctgagtactgtaatgttccacccgtccttcgggacggtaaatactgcggcatcctctacagcggctgccccggcgagaagccctgcgacggcctcgacgcctgctgcgagaaccacgacgcctgcattcaggctcaccacaatgagtatttgagccaggagtgcaacagcaaatttctggactgtatggaggccgtgagggagtccgggtcgccaaccttcaagggcaacaagtgcatggtggaggaggtgatggacgtgattgagctcgtcatcgaggcggcgctcttggccggaagggttcttcaccggccttagatggatgattggattcttcaccggccttttacgtgttcgtagtctgtactggntggatatttgatgtaatctcat

SEQ ID NO: 2843 - DNA, 452 bp, Lilium asiatic
  modified_base (37)..(38): a, c, g, t, unknown, or other
acccactcttcctaaaaaaaaaactaaaaattttaanntcccatttttactttcaaaaacaaaaaaaaaaaaaaaagaaaaagttccaatccctctcaaaccccccccaccttacttaccccttccattccaacccattatctctttctataaatttccgccaacttcaattaaactacccaccttttacaacctctttactaaaaaaaccctttctttacccaacttaatatcctttcaacacatccccctttctccaactttcttaatatcaaaaacctccctacccatctctctttccaacattttcccatccttattttccaattttacacaccctttaaaatcccattaacctccccctttttaatatttacacccaccttaacccttacacttaccaaccccctatcgcccattcctttccctttcttacttcatttatcacccat

SEQ ID NO: 2844 - DNA, 426 bp, Lilium asiatic
tacttgctttgggcattctttcattattgggcgtattattatgactacacagatgatggtatatctgttcgcactgggcgcattatcagcaaacgatcgaagggctggacgaagcggattctaaacgaccgtcatctcatatgcatagaggatccttttgaaacctcccatgatctgggccgcgtagttgacaagttcaccatcagaattctgagggaggaatttgagcgggctgcggatgtgctacaatacgatccaaatcccacagtcactctctttcaaccttatgtcccgcctacccataactagcaccaaaattatattgtttataggctagattttatgtttgcccgaatcatgtaaatcgttcagttatgcccccctattcaggtagggattttatatatagttttggggggcagtctc

SEQ ID NO: 2845 - DNA, 132 bp, Lilium asiatic
tgggggccaagtcccgcgtgagccgccgcgtggtaagccacgcgacagccatgcgtagacccagccccgtgcccgcactgtgcccgacccgcgcaccggatctactttagatccgatgcactattccatttt

SEQ ID NO: 2846 - DNA, 318 bp, Lilium asiatic
gggtctggaaccctctcgccactacgccttccctgcaattcctggtctcgtcccaaggtttccggcgccgttcgccgcttccaaaccacaacctgctgctgctgttcttctctcccacagcgctcctagctccccgtcgcacatctagagatgcaggcaactcttaatccgaggatgggagcctctaagaaggaaaagcctagaggacgccagcatggtttgacccaacagaggagacaagagattaaggaagcatttcatctatttgatacagatggttctggtactattgatgccaaagagttgaatgttgctatg

SEQ ID NO: 2847 - DNA, 317 bp, Lilium asiatic
ggtcaaatacattcatggattagcgagacacatcacaaacattagccttcaaagaaccgaacattattaaacgggaaacaagtgtcccagcatcccacctatttattggtgctttagaataaaatagttcagaaaccattgaattgatttcaggcattcaattgatttcaagcattcaatgtaaaaccacggcggcattcagtcagcatattcaaatagaacttgcacctgccaatgtcgctcccattgctgttgatacaatcttggaaggcctttgtattgatgttgcatgcatctccttcagcagtactagcagt

SEQ ID NO: 2848 - DNA, 271 bp, Lilium asiatic
aattcaacaataaactacatattactcggaatatgtcattaaaagcattcttgccttttacaatatcacaccaataattttcgaaaataactgctgaaaacatatgttttcagaatcatcatttctttcattactatttacatcccttccctagaagatatagggtaatatgctctattttgtcccggcacgaactgtccaaaaatgaacttcttgattataaatctttccccatatatgaaggatataacatcgatctaagccacatgct

SEQ ID NO: 2849 - DNA, 286 bp, Lilium asiatic
taggcatagtcataggacactcgttgctattttatgtgcagcagtaaacgctatcttctgcctgcgaaaagaggctgacgccaagggtgacaaccaaaaaaaatcccaggcgcctataagctctctgtccataagcacgtacaaagctgatggcatcagagttcaaattgtataacattaagtgcgcctacacagtggagacctacgagagaaacaaccattatgtgctgatgggcgatcacgctgtactaaccatcttggagcaggccacagggaacatcatcag

SEQ ID NO: 2850 - DNA, 379 bp, Lilium asiatic
accggccgaattcgagttccgggctcgcccacgtccggcttttcttcaaactcttgctaaaataatcgaggaccctaaagatcttaccttctagctgatgcttgaagactactgattctcggaaagagataccttaatagttgatgttggtgttcacttgaaaccttggtggagattctcagagagtcgttttagaggtagtggttcttggaattttgggctagtgaggcttgaagggaaatataatgatgggaggaattctggttgtcttttgattttttattttctttctttgtatcctttttagttttgttcggtagtttgagcacctgtattggtattcattcttaataaagatcgagtcagcaagatttaaaaa

SEQ ID NO: 2851 - DNA, 357 bp, Lilium asiatic
tccgcggacgcgtgggtgtgaagatggttttaaaacattatactaaggcaattgattgctacactagggctataaaccagaaagtgactggtgtacatgacacttcgatcctttatgcaaatcgtgctcatgtaaattttgcttttgggaattatagacatgctctaacagatgctgaggaagcaataaagttttgttcaacaaatgtgaaggcatattatcgtgcagcaaaagctgctcttttcttgaatattgtgactggaactgcatattttggccatttggacttgagcaggtcttattaaatgaaccaactgaacaactttttttttaaaattattatccacagaaagaaca

SEQ ID NO: 2852 - DNA, 415 bp, Lilium asiatic
tccgcggaaacttcccgcctagattgtgggatgatagttatatacaatcgttaaagattgatttcacggatgagcatgcagaccggatcaagaaactcaagggacaaacaaagcagctgattgaggaggagaagggagtggtggagcaactcagctcatagattccctgcaacagttaggacttgcatatcactttgaagaagagataatacatgtcttgaccggcttatcaaaatcaatggaccatgtactcatggttatcgagcataatctgtatgccaaagcccaactttttaggcttctcagagaacagggcttcaaagtctcacagggtactgacactagaactttatatatatatatatatatatatatatatatatatatatatatatatatatatatatatatatat

SEQ ID NO: 2853 - DNA, 274 bp, Lilium asiatic
gacgtgttcgtgaggtagtcgagcagagctggacggccgactaaagtcatttaattgcctatcctgcaacagggagaatgcagtataggtcgtgactgaaatgtatctgtaaaatgacaccttatatgcataacttataaggtttgaatgttgaggttgttactggtgctgctgtacattgtttagctgcatgggttgatcttccatttcttcgtgtaaccatgatttgtctcaggaactgtcgtttatataaaacatatatttctagtaaaaa

SEQ ID NO: 2854 - DNA, 300 bp, Lilium asiatic
caccacgagatcaaggtgaaggactcgaagaccctcctcttcggtgagaaggctgttaccgtctttggtgtcaggaaccccggaggagatcccatggggcgaggctggtgcggactatgttgtggagtccactggtgttttcactgacaggataaggctgctgctcatctcaagggtggtgcgaagaaggtgatcatctccgctcctagcaaggatgctcccatgtttgtgatgggtgtgaaccatgaggagtacaagtcagatatcagtattgtctctaatgctagctgcaccactaac

SEQ ID NO: 2855 - DNA, 63 bp, Lilium asiatic
  modified_base (60)..(60): a, c, g, t, unknown, or other
aaaaaaaaaaaaaaaaaaaatatatatttatttatatttttataaaaaaaagggaaaatnggg

SEQ ID NO: 2856 - DNA, 304 bp, Lilium asiatic
ggggggtacaacagtaccatatatttaaaaagaacttgtagccaagataaccataacattaatctaccagattaaaaagagaaactagggaactacgtacaaacaatagacaactcgataacgtatttaagccttcttgggcgatttggtggctttctttggagacttgggctcagtcccctccttgccagtcttttttggcagcagaacagggttaatgctggggaggactccaccgtgagcaatagtaacaccacccaacagccttccaagctcctcatcatttctcaccgccaggcacaca

SEQ ID NO: 2857 - DNA, 140 bp, Lilium asiatic
tttaggggggtttttagggctggactgtgtaagtagtacaaaagtgtctctgataccggtcgccgtgatcatgtaatttctatcttcagctggcactgtaaatttaagtaggatcaaactggtgggaagaattttatact

SEQ ID NO: 2858 - DNA, 255 bp, Lilium asiatic
  modified_base (92)..(92): a, c, g, t, unknown, or other
  modified_base (107)..(107): a, c, g, t, unknown, or other
aacatatcggaatgcacaaaacattgtgcgtacttatgggtaggaactatgcatagggtgacaacgacaagctatataaatcaatatgtctnaattaatgagccgcnaataagtgtccgctgattgtatggccacaaacagagataatccataacacaattaccggaaaaaaaaaaaaaaagggcttgcgctttgtaggatccaagcttaacaacgcgtgcatgcgacttgattatatcatatatagtgtcagct

SEQ ID NO: 2859 - DNA, 314 bp, Lilium asiatic
ggtgcccccaggcagcaggctgtcaggacatttcagatgtgtgcttttgggggaagctcgtggcttttgtatgcaaccagcacagaggtccgtgcatactatgggagactgttcccaaggacatggtctcccatcttagattctaagtctcctacaaccatcgagatgggagtccgaatggttgcctgagttctaagttgatattatctggccttgccagggtggggctctgtattacctgacatgcatttgaggtcgtgttgattcattattgtcgccttttttgctaaccctatttgctcttagaaaaaaca

SEQ ID NO: 2860 - DNA, 255 bp, Lilium asiatic
acgcgtgtgcggacgcgtgggtgggcattaacacataatggatatttggcaccatgaggggtctgagaagggggacgataagaatactgcttttcatgaatactaggttcttttagagttaattgagtatgtgcgaggatgcatcttgtgtctggcatagtatgtctactttagggatgtaacaaagtgtgacttcttgttcactgcttgaagaatttgtctgtatattcaagttcgagtaatttattcttcaat

SEQ ID NO: 2861 - DNA, 145 bp, Lilium asiatic
cggacgcgtgggtgatgagccgctgaagttgctcgtcattatgtgtatcatatacaatgggaatgatcccgagaattccaagtgtatttaagcaagttgatggtttgactgtactatttatgcgctgaggtgccaattgaaaatt

SEQ ID NO: 2862 - DNA, 405 bp, Lilium asiatic
gattattttatacaaattttttacccagcttatttgcctaagagaatcgaggatgcacagaggggtatcctgacttgtccttttgtgccaccgaagccaaagacaaagcataatgttgacattgacaccgtagagaagttttagactctgcggctgcaagagcatatgtactttgacgacatggttcaaaaatgcaaggatgtttgtgctactctagttattagccaatggtgttttgacgatgaagctaatcatttgttgatgcatttcaacttgcctgcacttatatggtttgttggtgtggaattggagttgattgtaatagctacaggtgggagaattgttccaaggtttcaagagttgacacctgaaaaattagggatagcttgtttaatgagggaaaaa

SEQ ID NO: 2863 - DNA, 436 bp, Lilium asiatic
  modified_base (308)..(308): a, c, g, t, unknown, or other
  modified_base (337)..(337): a, c, g, t, unknown, or other
  modified_base (404)..(404): a, c, g, t, unknown, or other
  modified_base (415)..(415): a, c, g, t, unknown, or other
ttcggcattccgttcgtcgccatggtaattgctctcatcatattcttgtgggggactaagagttatcgcttctatctcgtggaagatacatgtccatttgccagaattggtaaagcactcatcactttagcaagcaggcagtgttcattcggtaaccatcctattacatctagagaaacagatgaaacatgcctgccttctgcggatcagtccgagttatcaaatggtttcaggcatccacgtccagtaaagatggatgagcatgtagagagtacgttagatgaggttaagaaagtgctcggactatntccgatatgggctaccagcttaatgtatnggtgtgattgtgctcagacaacaaccttctttactaagcaagggaacaccatggataggagaatcgngccagacttanagtaccacctgcagcactaca

SEQ ID NO: 2864 - DNA, 398 bp, Lilium asiatic
  modified_base (42)..(42): a, c, g, t, unknown, or other
  modified_base (72)..(72): a, c, g, t, unknown, or other
  modified_base (100)..(100): a, c, g, t, unknown, or other
  modified_base (158)..(158): a, c, g, t, unknown, or other
ttcggcattccgttcgtcgccatggtttttgctctcatcatnctcttgtgggggactgagagttatcgcttntatctcgtggaagatacatgtccatttnccagaattggtaaagcactcatcactctagcaagcaggcagtgttcattcggtaaccntcctattacatctagagaaacagatgaaacatgcctgccttctgcggatcagtccgagttatcaaatggtttcaggcatccacgtccagtaaagatggatgagcatgtagagagtacgttagatgaggttaagaaagtgctcggactatttccgatatgggctaccagcttaatgtatggtgtgatttgtgctcagacaacaaccttctttactaagcaaggaaacaccatggataggag

SEQ ID NO: 2865 - DNA, 411 bp, Lilium asiatic
cggacgcgtgggcagacgcgtgggttggctctgagttacttcaagagaatttagattttggtgtttatcaagctctcatttcgagttacggatgtgtgtgcttgcctttgacatgttctcgctaatatgatgggctggtggggctaatttctcttgagtctgtcagtcggagctcttatcaaaaacttccaccctatcatttggcttgatgaccaattaactgcgggggggcccctctaaaggatccaacctgacttcccgttcatacgaactaatggttctaatatagggtcacttaatataagttactggcgctgtttttacaacaacattactggaaaaacccttatgaaacacaactaaactgttttgtggctcattcaccttttgacagctggagtaatcctaaaa

SEQ ID NO: 2866 - DNA, 212 bp, Lilium asiatic
  modified_base (27)..(27): a, c, g, t, unknown, or other
  modified_base (55)..(55): a, c, g, t, unknown, or other
  modified_base (113)..(113): a, c, g, t, unknown, or other
aataataaatgggtatagaagcttgantataattgtgggtctagttcgaagaagnccttttcaaggagttctgtcttcgtacattttgaatgatatgggttctttcatcctanatttcgaatgactttgcatcctatatatccctatagatcatataaaaatgtgcaatctagagacttatcacagcttgattcttttcaagaagacgatta

SEQ ID NO: 2867 - DNA, 168 bp, Lilium asiatic
  modified_base (11)..(11): a, c, g, t, unknown, or other
  modified_base (44)..(44): a, c, g, t, unknown, or other
  modified_base (74)..(74): a, c, g, t, unknown, or other
gtttcacttcnaccatctcctagcttttttccctttcactacanaacaatacctatggggctggtgataacgcnctgaatctgaatcacaaacgtgtgcaccacacgatcccatggaccctcaaacatgaaatccttctgtggctaccatcccacgcaagcttcactc

SEQ ID NO: 2868 - DNA, 389 bp, Lilium asiatic
  modified_base (10)..(10): a, c, g, t, unknown, or other
  modified_base (43)..(43): a, c, g, t, unknown, or other
  modified_base (101)..(101): a, c, g, t, unknown, or other
  modified_base (128)..(128): a, c, g, t, unknown, or other
  modified_base (160)..(160): a, c, g, t, unknown, or other
gttaaatcanagcaagcatggttatattagctttctagtaaanttatgaaactagatggtaaacacccttctgtttcaaaggtaattttaaaacttgttcntcaaatcggacaatcatctcggccaancactctgtttgatttggagtatgacaacctgnaacagccattgacagagttttactttcccaaaaaaactatagattctggtccgtttatgaagctccccaaggattgccaagagcttgccatttgttgcttatattacttctcaaatttgagtggagatatgcttcagtcactgacttcttgttgcttatatgataacttggagccagatgtattactacggattgtagaggttctggattctgcatataaagctggata

SEQ ID NO: 2869 - DNA, 285 bp, Lilium asiatic
  modified_base (11)..(11): a, c, g, t, unknown, or other
cttcaatcacntgcattccaaacccgatgaccctttcatcaacgccagaaacctcgatgtagagctccccgtctaacaagatgcacttgaacaaactgaacttgaaatacatcaattttataaaattatacctgcttacatataacactgtatactaccctaattatgcttgtggcgcacattacaattttatagaaaacttagatgatcactctcatgcttaacacactccattttgttaaacatgctctataggtttcttatcatactttattacttattaat

SEQ ID NO: 2870 - DNA, 414 bp, Lilium asiatic
  modified_base (12)..(12): a, c, g, t, unknown, or other
  modified_base (102)..(102): a, c, g, t, unknown, or other
  modified_base (130)..(130): a, c, g, t, unknown, or other
cctagacatttnggaatcctttaattatttacatggtattgtatactaggttattgaggggcttgtcgcttcacatgtcggataccgcatttcatgaaatgnctatcaagacatatctgtatcgtaaganacaccacatttttcatgtatatataaaagttcatatacatatgtattttatgtccgtacacacacacatatatatatatatataattatttctttagaatttatcaaatgtccttgtaacaagggggaggagtgagacgagtgaaaaaaactgacatattgagtgatgtcaggttggcctgtcagctatatggaattttttatacatgatacatatctcaagatacactgcaacggtactacatactctaattagtattgaccctggtatgatatatttcctac

SEQ ID NO: 2871 - DNA, 311 bp, Lilium asiatic
acgcggacgcgtgggtggagcctcaacacctatttcgctgcctacgtgactgccggcaaaggggggattcagctcatcgacagcgacgggacatcggcctacgacgatgagctcggtccagggcagctggtcatcgtgcctcataccttcgtgtgcatcaagcaggcgacaggggagacgttcgagtacatttccttcaagactcacggtgccgccatgttcaaccacatcattgggaaggaagcgctgctgcgggcattaccgggcgaaatgatcatgaactccttcaacaacctcactatggaagatgt

SEQ ID NO: 2872 - DNA, 316 bp, Lilium asiatic
gtccagtgccgccgcaaagtcgagaggctccgcagacgcctaagggcggagaagctgcggtcaatcgcccatgatccatccgcgacgccgtggtcctcatggatatccgagagctccaacaaagggaccctgatgtagtgttccagagatactgctattgctggaatgtttttccaattttccgtgtatgccgaagtttgtaatttttattgtatgtatgaacataaaaatatgtttaaaggtacaggattaggagtctaggctgtaatataatagttataatgaagtgatatatactctccggcgtgattttcga

SEQ ID NO: 2873 - DNA, 403 bp, Lilium asiatic
aagccctccaaatcactgcaagctaacattcaacccgatcgtagttgctttgatggtcccaagcaagcaaagatacctgcaatgcctgaaattgatgattctgccattcagatacaagaactgtctgagaagatccaagagcttgagcttaatgtggaaaatattgaaaaagaaagagacttctactttgccaaactgagagacattgaagttctttgccagagaacagagctggagcatcagccgatgacaaaggcaattcggaagattttgtatgctgctgacccgaaagtgtctcctctggtggaagcccaagatatggtgagcagatcgtcaactgatggcgatactgaagctgaggcctgaataagtaagaagttgtgtttaggagtattggtccatc

SEQ ID NO: 2874 - DNA, 393 bp, Lilium asiatic
taaccagattatgagtgttccagttaaatttattattccacggtggaggaaggattcaaagaggcggcacagaaaagtgaaggtcagttatgatgattggagtggcaaacctgaagcgcagcgatatgatatgatgtccgatgccttttgtgaggttgcagaaatgtctactgattctgatcagaaggtggagtttgtcctgaatcggatggatggattgaagaaggagctaagaagagaagaaattatgtgtggtagtagtcaaccaactatcaacatgaatgatgaaacactttacttctcttggtgatgctattcaaatatcaaagcagagttaaaagcttactcttatttagttaaaggtcgccaatatttaagctgaatcaaatctaa

SEQ ID NO: 2875 - DNA, 315 bp, Lilium asiatic
  modified_base (22)..(22): a, c, g, t, unknown, or other
  modified_base (46)..(46): a, c, g, t, unknown, or other
tacttattaccaaacctttccngactcccttatgtttgccggaggntgggttggatgggtggcccttcctctccccgtcgggagaacgacggcgaggggagtggcgggagatctccggctccggcgacatggaaggagcgcccgaggtccttcgacgagaagaccaggacggcgtgttggcgtaaggcagcggtgctggcgggacggcacccggaacgctggcggcaggacgccgtgggcaacgtggtctgccgccgcttctggggctgccacagatgcccttgctacgagtacgaccacatcgtccctttcttc

SEQ ID NO: 2876 - DNA, 359 bp, Lilium asiatic
  modified_base (23)..(23): a, c, g, t, unknown, or other
  modified_base (59)..(59): a, c, g, t, unknown, or other
gacccacgcgtccggttacgcgntcgctttctcgcgtgctgtcacatgttcagacacgngaactaaagcggggacaatgacaagacctatcggcatcgtatctatcgcaagtgaaactgggaccctgcttaccagcatccatattcatcgaaagcagaactgacgccccctcaagaaaatccctgatacaacatcagaaaaaaatctcttgcgcttacctggaaactctggcctgacaaataacagaatgataagaactaaaaacggctactcctggactctataacggaagccccacatacaccgaatctctctgacaatacacggttctgtgatgggtactatctaaaatttcacaa

SEQ ID NO: 2877 - DNA, 371 bp, Lilium asiatic
ttagtcaacggacaataattcattgtcgtttggtaaaaaatattatgagaaaaattttgtgctccaaaattgtcaattaacaatttggcgagatactagatagaatagctacaatcgaatgaatctgctccatttgtagatgaatactccatatccagaaatcttcaaatgtggtttcttctaggtgatcctacacgaagaatgatttttatatatggaaaatttaagttggtaatcatagaaaagaaaatagtcaatatggcaatagttaattatagttggtcaagttaaaggaacataaatcttgtattacacaagtggtgaataatgcgagttagttgagattataactcaagtgcttctttagagac

SEQ ID NO: 2878 - DNA, 334 bp, Lilium asiatic
tagtcaatggacaataattcattgtcgtttgttaaaaaatattatgagaaaaattttgtgctccaaaattgtcaattaacaatttggcgagatactagatagaatagctacaatcgaatgaatctgctccatttgtagatgaatactccatatccagaaatcttcaaatgtggtttcttctaggtgatcctacacgaagaatgatttttatatatggaaaatttaagttggttatcatagaaaagaaaatagtcaatatggcaatagtaaattatagttggtcaagttaaaggaacataaatcttgttttacacaagtggggaataatgcgagt

SEQ ID NO: 2879 - DNA, 259 bp, Lilium asiatic
  modified_base (20)..(21): a, c, g, t, unknown, or other
tttttatctttaactaggcnnggagccgtccgaggaatggatgcggatttagggtccgaaataccacatagtctgccttaccaacatattgcttgctatttatgtgatcttgagctataaggctaacaattttcattgattgtggccaatctgcttcaatcgtttcataagccgtagcacttctataacctttaagtttacaaatgaaaacaggctgtccttggctatgttcagatatggtaccctggccaattttgca

SEQ ID NO: 2880 - DNA, 391 bp, Lilium asiatic
tccttttcttcctccacttcatcaacatcctcaactttccccttttcgtctttcttgtcttcctcatcctcatcatcagaaatctccttctcagtggtcttctcaacccatagggagattgggtaactaatgaattcagaatgcttcttaatgagatccttcaggcggcgctcctcaaggtactccaactgatcctccttaagaaagagagtgatcttagtccccctcccaagcctctccccctcctcatccctcgtcaccgtaaacgaaccgccagcctgcgactcccacacatactgctcatcatcattatgcttggtcgtcaccaccacccgctccgccgcaaggtacgcggagtaaaacccgactccaaattgcccaatcatgctca

SEQ ID NO: 2881 - DNA, 270 bp, Lilium asiatic
  modified_base (130)..(130): a, c, g, t, unknown, or other
catccaacaacagcttctattttttcaaaactaaatatgcaactgagaacataaatgccaacacgttttgtttgttagaattcaatttacatccgttcccgctaaaatagtctcaagttcaaagaaaatngaaaggacaacaaagaagagtagttgaagcgttacctaagtcctgggctcgcaactacagctcggactccactattcagctacacaccatgaatgcctgcggtttgcaagagtacccccttgatttcttctggtagagca

SEQ ID NO: 2882 - DNA, 443 bp, Lilium asiatic
cgatgaaccatcaacagcagcagcaggatattggaaaccttcttttaagtgggcttgggtgggcgaacagcttcaataatcgggagcatggatcaaaaccatccgcgtgactaccattggtcgcacacctacttcatattactcaatacagtttcctgtgcaatagtgacagagctacatttatctctcatatagtgtagcttcttggatacgtctggattactcgacttgtatacgaagcagcttgcctgaagagcaacatagagaggtcgctgtatatgatgcaacattaatgtcatatgcgaaagacatggaaatgcatcagcagtcttgtgcttcttgtacgatttgcctagtcggatgtacagatcatctgtgcaaagcgctggtatcgtcacccatttctgaacatgtaaaccaacattctgacgtgctttgtaatc

SEQ ID NO: 2883 - DNA, 215 bp, Lilium asiatic
tcgagcattaaaccctggcttcttatctcagattatagatggcccggaccaaggagaccgctcgcaagtccaccggcagaaacgcccctctcaagcagattggcacaaaggctgcaagagaagtaccgagccaaccactggcggcgtgaagaagacgctccgacaccgtgccggaaccgtgaaacttcgcgagatctcgtaagtaccagaagagt

SEQ ID NO: 2884 - DNA, 65 bp, Lilium asiatic
atccaagcttttgtacgcttgcatgttacgttttagctctcctatagtgtcaccgacattcggtt

SEQ ID NO: 2885 - DNA, 399 bp, Lilium asiatic
  modified_base (254)..(254): a, c, g, t, unknown, or other
tatgatgctttaaagctggttgtgagtttgattgttgttctctgagcttgcatgttgggggttcttagttatgtctctgttagctttctagtttagagtacaaattgttttttagttgaaattgcacttagtttcttcgaatacgatccttttggtgatttacttgcatgttgaatttattctttggtcaatgcattgagagcttgtgtttcactcttttgttgggaatcaatgtccgcctctgtgaagcttangctaatggagtgattcaacccatttgttggtacttctggaattgaaattcttctgttgtgattgtttcctattcggataagattcttgataacctttggtagagaatcttagtccaattgttaggattaccttggaattggtttt

SEQ ID NO: 2886 - DNA, 419 bp, Lilium asiatic
  modified_base (383)..(383): a, c, g, t, unknown, or other
aacaaaaccagagattaattgtggagctagaccttggaaaattaaaccaagtcgtcgattgtgctgctggcattgtaaagaggatccgtgatcgatgcgctttcgggtgggtacagatgaaggatctttgtgtctcagtttgaacaatgctactattgacatctttactggagctgcgagcaagccttatcagttggagtatactggctatttcacataaatatatacgtgtgatccctaaaagccaagaaaatatgtgatgccatttagttattggtgtaactgaattatattgttcttgatatgttgagatgagttcaagcagaccttgcagcgggatgtagtacaactattataagtctttttccaaaatttggtttggntaaagatatggattacatttttaattattttggaag

SEQ ID NO: 2887 - DNA, 333 bp, Lilium asiatic
ggcctttctttaattggctcgaacaacctgaaggggaagattgagtataatggagggtactatcactttcaattgtcgtttgtttcatgtgtatgtctgaatatgtcaactctatgggaggcatcacttaaaatccatatccctcatgtatggcgcgcataagtatgtttacaattaaaaatgaattttcttaaaaataaaagctgcaaaaacatgctctatctaaaaagtgaactgcacatcccctgtatctgagctctttttcacaccagattaattcaaaacgcttacaaaaatcccccaacataaaaaataaataaaggcccccttttt

SEQ ID NO: 2888 - DNA, 348 bp, Lilium asiatic
  modified_base (2)..(2): a, c, g, t, unknown, or other
cnccctcttattcccccacatcgacttctttctcaccccttctaaacatttacaaagacgtttttaaataccggcggcccctcccccttttaattatatattgacatattcaacactcaacacctacccactaactaccttcactctctttataaacatacctataactcataatgacacttactactcctaccaccttaaccgaattaaaatcaactatatcaaacaatgcatcctcacaaataattaaacaaatttttttattcaatatcacacatcatcctcatatatttcttctacaaaaaataaaattcattatcccaactctctataatacttctcctcccc

SEQ ID NO: 2889 - DNA, 406 bp, Lilium asiatic
  modified_base (44)..(44): a, c, g, t, unknown, or other
tcctgaagcgctctaaaataaaaaaagaggtactcctcgcagcncaggattgtgagtacgatcgcgccgatggggcatattaggaccaagcggaaggggcacaagtgtgaccgtgtttctgctgagaagcgggcgcatactgctgagttgatgaagaagatgccggatatgctgctggattataagaaacggcgttgggcgaaaaagatggcagaggaagagaggaaggagaaggaaaccgattagagaaagaaacacaatcttgtgatgtttgttggattagtttgagctgttttgttggattagtttgagctgttttgtgctgcagcatatagatgcattctctgtgtacaattctcagggaagtgtagaccaaaagctgcactttcccttgttttatttgatt

SEQ ID NO: 2890 - DNA, 437 bp, Lilium asiatic
  modified_base (23)..(23): a, c, g, t, unknown, or other
gaagaaagcagcacggggtttangggcttccttacagaggcaagggaaatacaaggatgcggtaaaatatcactccagggtcttggagatttgcaagcgagcccaagaggattctggtatgatagaggcctttggagccatagccgactgctataccgagcttggagatctcgaacaagcagggaagttctatgacgagtacatagcaaggttaaaaaccgactgattttcagtattttctactcggtatctgaccagttttctccgctatgagttacacaatttagaaattatcaatttatgtacctagcattgtttgttggatctgtgcagtaatgagtttgtatcgattgtaaagtgtgtacccaggctcctcaattaagtcttgtagttattaaaagatgcttcttgtatgtctggtacttcctattctaatg

SEQ ID NO: 2891 - DNA, 382 bp, Lilium asiatic
cagtcgctttggctcgactggaaggaatattattggtgctactaacccggcggagtcgggtgcggggactattcgtggggatttcgctattgagattggaacgaatgtcattcacggcagtgactcaactgaaagtgcgatgaaggaaattggtttgtggttccctgatggcattgctggctggcatagcaacctccacccttggatttacgagtaagcagaagctgcaacagcagcttcagcatgatatatgaatagttgatggctgaagataagttttggttcatgttgagagttatttgagagtctcggactcttgccaaacagttatttgtctaatgttattgagtcttgtactgcttttgctggagcttttgatgaa

SEQ ID NO: 2892 - DNA, 372 bp, Lilium asiatic
  modified_base (12)..(12): a, c, g, t, unknown, or other
tcatccacaccnccagctcgaaggagcgggtaaacatgagcgaggcgctctgcatgcactgctggcatcgcagctttcaccttcagaagagccggtgttcgtactgcgcgtacccagccggccagatccgcatgtataactggagcgtgaaggccattaggcggaagacaacaagtaccggaagaatgaggtatctctcccatgtgtctgccatgttcaagagtaatttcagagaaagtactgaagcaactcctaggaagagagcttctgcttctgctactttttaacttgccacttggctttcttcaatgagatcaacggctcgcacatgcctcttttaattatatctgctggattctgtttggtcaactt

SEQ ID NO: 2893 - DNA, 267 bp, Lilium asiatic
  modified_base (41)..(42): a, c, g, t, unknown, or other
  modified_base (80)..(80): a, c, g, t, unknown, or other
  modified_base (91)..(91): a, c, g, t, unknown, or other
aaaaaaaaatattttaaaaaaaaaaataaaaaaaaaaaaanngagaaaaatgaaaaaattttataaaataatataaaatnaaattaattgnaaaattttttgggaggttattgttttggttttaatttttttttccgaaatttttatactttaaattttaaaaattttactttaaaaaaattaactataattaatttaaccacacttcatttaaaacacctttttttaaaaaaaatttaatttaaaaaaccttcttccctccaattt

SEQ ID NO: 2894 - DNA, 355 bp, Lilium asiatic
gcgcccacgcgtccgatgtgtcccaatagtgtatcttcccaataggctcgagcaaactgcgccgtgtgaggatcggcggcggccgatggacaccgccctcttctccccctcctctcttttccatgactccgacgacaactccgccggagaagacggcgacgacaccgccgccgccgagaagatgctctatgtcgagagacgccatgcctttcccggcggaaccgaattgatagttcgagaattttcattccatcagctgaatgcgaatttactgtggcccgggacctttgcgtttagcgaatggctagtcgagaaccaatcggttcttcaggggcggcgaatattggagttgggg

SEQ ID NO: 2895 - DNA, 238 bp, Lilium asiatic
agaaggagggtaaagacctttgggaagtcacggcctccaaaccccaggagaagcgctcctgccaagaggccaaggatgaggtagacgtctaaattccttgcttaggctttggtaatcaacatcatgtccagacctgggtgaagcatcttattagctatctagtttcgtgtgtgctagctatcttattttgaacatgttgtacctttattgttttaatcatgctctcttgttctgtgac

SEQ ID NO: 2896 - DNA, 355 bp, Lilium asiatic
  modified_base (314)..(314): a, c, g, t, unknown, or other
  modified_base (324)..(324): a, c, g, t, unknown, or other
cttccgaagaaggtgccactttgtaagaatttgaaccaggaaggtgcctggatgtggccgcgttaaaaaaaggaccactgacctgcttaaggttggcaaggccaagcggccgctcaaggtggcaaaaagaaagctgggtcctcacaagagggctaagaagaaaagagaggagatggctaatgtcctcaggaagatgaggtctgctggagtgtccgataagaagaaatgatgaggagagactacttgtggactgctttcatatttcggttagcattatgtttctcttgaactgggaacctagctgtagaactagnttaattttgntgtttttttatgcgtgaaaggatctcctttt

SEQ ID NO: 2897 - DNA, 210 bp, Lilium asiatic
tgaagggcagctcggtcaattttttgtgctgccttctccgcggttgttgttaggtctggacgttaatttcgtgatgggctctggatttgtggtttgtgaggaataatgtgtgtgagattcatagtgttagcaatcttggatattgtcccttgagcctagacgatgacgagatacttcgtgtggactgcttatatgtcaaccgtagcttta

SEQ ID NO: 2898 - DNA, 205 bp, Lilium asiatic
gtttggaatgaactcatcggtttgaagtgaaacggcttagcgtattaatgtggggtgacgttctcacttcgtcaagttctgcgaaactgatgtgataccttgacaacataggctaacagatagactaacacatcataggaggcgactgtcgagatatgccttgtaattaagcaactggatagaatctaacttgcttggggacctt

SEQ ID NO: 2899 - DNA, 283 bp, Lilium asiatic
  modified_base (29)..(29): a, c, g, t, unknown, or other
  modified_base (80)..(80): a, c, g, t, unknown, or other
ttctaactgagaataaccctttgaccggngacaagggaaagatcggggtggggtgcaacgcggctaacaagaggcactanatagtgttggtgctgagaggagtgtgtgtggcggccctcctatggatggggacggtgctgtggatgttgttgctgccgcttttcctttgtttttgtttcggtgttatcggtgcctagctaggattgtgggtgatgaagatgtattatctatgaaaggaggatgttgtaggtggtgtttctctctaagtggtaagatccatgga

SEQ ID NO: 2900 - DNA, 296 bp, Lilium asiatic
ggagcagttacggggctcatggagggctcgatgtgtacctgaacctgctggaggacgaagcctgtgcaggaacagcattagattgcctcgcagtttgtttggctcatgataatgacaacagaaaagtagagcaagcattgttgaagaaggaagcaattcagaaactcgtcaagttcttccaaaactgtccagaacaatattttgttaacatattggagcccttcctgaaaataattacaaaatcgtcacgaataaatactgctatggcaatcaatggtctgacaacgttactcatt

SEQ ID NO: 2901 - DNA, 340 bp, Lilium asiatic
attaccctctcaaataaatccctatgtgtaccaaaacctgctggaggacgaatccttaacaccaacagcattatattgcctctcagtttgtttggctcatgataatgacaacagaaaagtagagcaagcattgttgaagaaggaagcaattcagaaactcgtcaagttcttccaaaactgtccagaacaatattttgttaacatattggagcccttcctgaatataattacaaaatcgtcacgaataaatactgctatggcaatcaatgttcttacaacgctactcattgcaaggttggaccatcattatactattgctcgtcttaaccttctaaaatta

SEQ ID NO: 2902 - DNA, 389 bp, Lilium asiatic
cggacgcgtgggctttggggctgttcaggatgccttcgtacaacggaaagacagagctaatttgcgacgtgtatctagctttgaagccctccaatcagcaacaaaggcccttcctacagattatgttaggctggaccaggacattttgtctcctcttgctgggaagaaagagctgtatacctatgagactctcgacttctgggaacagatcaagactccagggatgtctttgagatgttctgcattatatctctcccagtaccgtcataccgctcctcatcttctagctggaggaaatggaaccagaaatgcctccatcattggtgatgttcacattcacccatcagccaaagtacatgcgagtgcaaagattggccctaatgtctcaa

SEQ ID NO: 2903 - DNA, 358 bp, Lilium asiatic
  modified_base (89)..(89): a, c, g, t, unknown, or other
cctcgtcgtcgcccctccctttaccagccttaactgcggatgcgaaccccgaggggcggggatgttatcggtgaatgcactcgcactanctaggatggcggcatcaggcggcggcgccggtggcgtcagcgctctggcgggaattgagggggccggtgatattgccctgggctcgctctggtggtacatatacgcctgggtctaggcctttcttgatctatttgcatgtatcatgtgggggttgacgctagggttgatgtcactcgggcttgttcagctctatatcttgcatcggaatgggaccgataatgacaacaaacatgcagctattattcttcccgctgttcaaaaagcacac

SEQ ID NO: 2904 - DNA, 167 bp, Lilium asiatic
gaataataaggaggaggctcacgatcgtgcggaccatctcctgttgaatttcgagctaggggtagagaagtccgaactcagttgcatcttcggttgcacatgcaccggcgtcgcgtgtttatgttattcttgtactttgacttttgaagctggttattgtcagtctg

SEQ ID NO: 2905 - DNA, 423 bp, Lilium asiatic
attccgggtcgaccacgcgtgcgggaggtggaagggaagtgggttgtccaatgagccctcaatgtagatattggtgcaaacgcctcagcggaaggtggtgaagatgatgaaggggttgatgaccaggccgtaaaggtggttgatattgttgacaccttccggcttcaggagcaacctgctttcgacaagaagcagtttatggcatacatgaagcggtatgtcaagcagttgacgcctaaacttgatgccgagcagcaagtgctatttaagaagcacattgagggggccattaagtttctgcttccgaagcttagtgatctgcaattttttgtgggtgagagcatgcaggatgacagtagcctggtgtttgcttattacaaggaaggtgctactgatccaacctttttgtacttcgcgtacgga

SEQ ID NO: 2906 - DNA, 297 bp, Lilium asiatic
cattccctacatttttattatattttctacaccttcccccttctttatcaacctgctttccacaacaatctctttatttcatacattaatcaatatttcaaacactttactcctataacttcattcccaccatcattttctatttaataaccacattctccttacccattaattttctccttcctaatcttatttatctccaattctttttttctcataacattcatcattacaccaaccttttcttttcttattacaaataaaatcctacttatccaacctttttttacttctctc

SEQ ID NO: 2907 - DNA, 301 bp, Lilium asiatic
ccttaccctatttgctctctagtgcgaatgatgaatgactggaaaagcattttgtctacagatctgggcataggggatgaacccacagagcattcttcattactaggaagataaatatctgctagcattgctcagctgagcaaagaacggaaactacaatacgaggaggataactcgagactgccatgggcaaagcataaataccgagatcgtttcagtagctctatgcccgagtctataattttcaatagcagtggaactcatgttaaggatgcagcttgtcggatattttattacacac

SEQ ID NO: 2908 - DNA, 375 bp, Lilium asiatic
gcatcgctgaagctctttttcgaacagttacggaacgcccgcacatacccctgcggcacggtcatgaccctttaccgcgtccgcttccatcgagcttggcttcaggcaaggcgtttcggattccggcaccgatcaatgccaggtccttctcgactatggcagcgacgtcgtagagatgacgatgcaccccgactcacaacctcatcagtggaagactggtaaaccctttcccatcgatcgatccctctcccacttaatagctaatatttgagttgaaattatcaagggatgtatgtcatggaggatggggtatacggacctactacttagagcagccatgctttcattcaggttcacacaatagtctacctatta

SEQ ID NO: 2909 - DNA, 451 bp, Lilium asiatic
gcgcccacgcgtccggatcgtaaaggatctgcatcagggatccctacgacaacctagggttatgatataaaaaattaaaagggatgttacaccttatccagttccggaatgcatgtgcaatggaactgatacaagatactccgtaaaacaagaatcagtaagtaattgaagctgccaattcttgatattgatctattgaggcatcatacaaatgcgattcctgtattttcataaagcatttgaagcatgaatgaattcctgattttgaggggctcttagtgccaatgaaataagaatttcaaggaaagggagcatatacaagggatcctattattgtgaatgtagggactggtccctacatacagttccacaattgtggatatcgtttgtgcccaaagaatccaatatcacgtcatttatttattcttttcaatttcattaattttaagca

SEQ ID NO: 2910 - DNA, 318 bp, Lilium asiatic
  modified_base (52)..(52): a, c, g, t, unknown, or other
  modified_base (57)..(57): a, c, g, t, unknown, or other
gaagaaggtcgaggaaagcctgaactctgatgaggttaagcttgagatacanaggangatagatgaaggtcggaagaagatatttgatgaggttgcagcacagcttgagaaggaaaaggaagcagcacttgttgaagctaggcagaaagaggagcgagagcggagggagagggaggagttggataagatgctggaggagaaccggcggaaggtggaggaggctcagagaagagaagctttagaacagcagcagaaagagctggaacggtatcaggagctggagcgacttcagagacagaaggaagaagcgatgaggag

SEQ ID NO: 2911 - DNA, 484 bp, Lilium asiatic
  modified_base (23)..(24): a, c, g, t, unknown, or other
  modified_base (39)..(40): a, c, g, t, unknown, or other
  modified_base (69)..(70): a, c, g, t, unknown, or other
  modified_base (160)..(161): a, c, g, t, unknown, or other
  modified_base (190)..(190): a, c, g, t, unknown, or other
  modified_base (192)..(193): a, c, g, t, unknown, or other
  modified_base (205)..(206): a, c, g, t, unknown, or other
  modified_base (238)..(238): a, c, g, t, unknown, or other
  modified_base (328)..(329): a, c, g, t, unknown, or other
  modified_base (374)..(374): a, c, g, t, unknown, or other
  modified_base (398)..(398): a, c, g, t, unknown, or other
  modified_base (414)..(415): a, c, g, t, unknown, or other
  modified_base (468)..(468): a, c, g, t, unknown, or other
caacgcgtgcgcgccacggcgtnncgctttgttacatgnntgatgcgcttgatatctttcattggctanntaccataatggaaagggcttttgatgaggctttatccaacacaggagaaatcaaggtgtaccggctttgtgggtactttagtgagtgganngcggatttccattagtgcgaatggaacantnngctttcactganntatactatgaacttccattggtggttttatantgaacacgctgactagagattcttatactgaatggaagggtgaaaaagggtaaacccccgaaatgattgcttccaatcaaccattttatnnggtgtgcaacttcaattccaatatttaatccttatttttatctantcgtacttatatttgatgtcatancgcaggggcacttgcnnattagctgcatgtaagtgtaaacatagtatatttcaactcaattgtatatttntaaaaaacttttcttg

SEQ ID NO: 2912 - DNA, 285 bp, Lilium asiatic
tagtgagtggagcggatttccattaggcgatggaacatgctttcactgatatactatgaacttccattgtggttttatatgacacgctgatagagattcttaactgaatggagggtgaaaaggtaaacccccgaaatgatgcttccaacaaccattttatggtgtgcaacttcaatccaatatttatccttatttttatctatgtacttatatttgatgtcatacgcaggcacttgcattagctgcatgtagtgtaacatgtatatttcactcaatgtatatttt

SEQ ID NO: 2913 - DNA, 210 bp, Lilium asiatic
aatgccttaggtcatatcggcttctcgaatcagaagacactattggcttctggataatgtacaagctacccttggccagccttagactgtcctcccactgtgatgcataacgacgcagtttaatcggatctgactttaatgtgattttgttatctagtaccctgagacaatcatgttcggtgacatgctatgaagattattagttgtctc

SEQ ID NO: 2914 - DNA, 345 bp, Lilium asiatic
cccacccttccggttctagatctataccttgatctagtcggagatattccatggggcatgggtgtttctaaggtgatatgcgaagaaaaacaccgtgtacacgattgagtactagagtgtgtactgtattgagctcaagccatcgttgatggattttgtgtgatactatgaagagactttgggttgataattgagactatcaataagaatctgaactgaaagtttggcgagtaggtaaatgggtgtacattgtcttgctcattccaatttttaatgagcatattatgtggcgatatttatgcttaaatctatgatgccattatatatgataaaataagcaagcac

SEQ ID NO: 2915 - DNA, 422 bp, Lilium asiatic
  modified_base (70)..(70): a, c, g, t, unknown, or other
  modified_base (87)..(87): a, c, g, t, unknown, or other
tgtccatccccgcaggtctcgacccctctgaaaccctagaaaccctaacaggggatcccggacccatctncagcggaagagatgtcngccccagggatggacgaagacaagaagccggcgcccgatcagggcgctcacatcaatctcaaggtcaagggccaggatggcaatgaggtcttcttcaggatcaagcgtagcactcagctcaagaagctgatgaatgcatactgtgatcgccagtcggtcgacttcaattctattgcctttctttttgatggccgcaggcttcgcggcgagcagacccctgatgaattagaaatggaggaaggagatgaaatcgatgctatgctccaccaaaccggtggtgcgaagaatgaagcatgatcagataatttagctactgtggagatttaaatgacagc

SEQ ID NO: 2916 - DNA, 317 bp, Lilium asiatic
ctccgtcctcctcatcctccctggagatttgtctagcacgctgtttctggagacgccggggctgtttccaagttcaccagtgcttagtcttacggggtgtctaagactgaccgagcgtctgtacttagtagcttctattaacatgtttcgatttctgatcgaaacttatgatatttcaattacccagagatgaatctcgctctataattatttgtctacatcaatgacatatcattctcagcagtaccaattggttgttctatcaatttatgatgggcgaatgctatgcagtaagcatacctcttttgatttataaa

SEQ ID NO: 2917 - DNA, 325 bp, Lilium asiatic
tttggacaagatcactggcccaaaatggataaaccaaaaacagtgaaaattctccgaaggctcagtgatgccctttgtttcttcagtcatttgtccggttaggtctgaggttggcttggaaggatgttaaggcccttttgttttgatttttgttaagttctgttattgttaaccagggttacttattcttgtatctgagaatcatgtttatgtaaaaaaacatttagcagtcgtattcctgtaggctgatagccttcaaactcttttagaacaattatcttctgctggttgggcctttaatatattgcttcatttattcttcaag

SEQ ID NO: 2918 - DNA, 385 bp, Lilium asiatic
gcgagagtgtcgaaagctctatccacttcattcggactgcctagttcacacgaaagctacctgacctcgaccagatgcttctccctagccttctctatcatcattctctttcaaggattgctggtgaattgtatagatgatcatggccttttgtgcggatcaggggtttgatcaaatgccggaacgaggatgactagataaggagctctgaacattatagaggatgatagagcatcttgaaggaagcaagtgttcgcatctgtatataacaagatttctctgttgccacagtcttctgagtgcaaggtaaactggaacactgtgtgttgatcaatatgcttgggcacgaagtcaagacggcgtggatctaaatcaaactggcgct

SEQ ID NO: 2919 - DNA, 356 bp, Lilium asiatic
  modified_base (11)..(11): a, c, g, t, unknown, or other
acgataggtcnaaatctctattccttcaatcgtctaccagttcaccgaaaactacccacctcagaccaatgttactcctagcctgctctatcatattctcttcaaggattgcttgtaaattttatagattatcattcccttttttgcgtatcatgtgtttgatcaaatgccggaatcaggatgaacataaatgagctcgtaacattctagaggagatagagcattttaaggaagcaagtgttccatctttatataacaatatttctctgttaccacagtctttttaatgcaaggtaaactggaacactgtgtgttgatcaatatgcttgagcacgaagtcaagacggcgtggatct

SEQ ID NO: 2920 - DNA, 413 bp, Lilium asiatic
ttggggtggtttgccacacttaccaccgcgttccccctacgaggattggttccgtttcccatgatcacacctatataaggggtaagtaccgtttcccaccgactatcccaattcggcgggtctttctcgagtcttccatctctatcctcaaatccagagagatttagggttagggtttcccccgtcgccggcgaagatgatcgaggtggtgctcaacgatcgcctgtggaagaaggtgcgtgtgaagtgcaacgaggacgatacgatcggcgacctgaagaagctggtggcggcgcacaccgtgacccgcgccgagaagatccgcatccagaagtggtacaacatctacaaggaccacatcacccttggtgactacgagatccacgactgcatggggctcgaactctactaca

SEQ ID NO: 2921 - DNA, 305 bp, Lilium asiatic
ctcgccaatgcaatgctctgagtggttccacatgaccagttgcaacgggcgggggggcggagattgtctttcacaactcttgcttaaaagtataactcagatcgaaggagcaactcatggagttaattgtacgaccaatataaaaagaaaatctcaattatacgcttaagacatgcaggccgagtcgaacgcgcttcgaaaaaaggcataatttaagagaactttaccagccattatgggatgatcgtacacttgaaaccagctattcataccgtgcactttctgtacgattcgctgatcatcct

SEQ ID NO: 2922 - DNA, 412 bp, Lilium asiatic
  modified_base (17)..(17): a, c, g, t, unknown, or other
  modified_base (19)..(19): a, c, g, t, unknown, or other
gaccgcaaggtcctccncnacaacatacagggcatcaccaagccggcatgcgccgggtgcccgtcgcggcggtgtgaaccccatcagcggcctcatctatgaggagacccgcggggtgctgaagatcttcttggagaatgtcatccgtgacgccgtcacctacaccgagcacgcccgccggaagacggtcaccgccatggacgtcgtctacgcactcaagcgccagggacgcaccctctatggcttcggagggtaatctatctagggtttcggtggatgaactagaaatcaattctgtctcctcttatcttaagagtgttaagtttgtgatgtgaatcttcgttttttatttctttctaaatatggagctgtattagatctttgtgagattatgaactgttttgattgctct

SEQ ID NO: 2923 - DNA, 436 bp, Lilium asiatic
  modified_base (6)..(6): a, c, g, t, unknown, or other
  modified_base (8)..(8): a, c, g, t, unknown, or other
  modified_base (55)..(56): a, c, g, t, unknown, or other
gaattntngaatcgacccaccgacccactcgtacgagctctctctccctaatatnncttatcataaatgagaattccttctcatcttgaagacgcgatgcctatcaaacggcgttcttccatcaccgtatcatctaccaacgagcaatctctcaactctaaaatctccactcgagaagctgtccacgcgggattcaacacagcctctattgcaactgttgttacttcagtacccgcattgactgcttgtcgcaccattccttgggctaaagcaaattttaatgccactgcacacgcgcttctgatatcaacagctgctgatgctagcttcttcattgctgccgataaaactatactggaaagtgcaagacgaaatactattgggaagcctgataaacatgcttgatttggacctcaagactcaccttttatcatac

SEQ ID NO: 2924 - DNA, 314 bp, Lilium asiatic
aacaaaaataaaaaaaaaaaattcaaattctcaaacatacataaaaaaaaaggcaagcgatctttaaaatcaagatgccctacccctaaatataatccaatatctctcatataggataacctaaatccaatccacttaccacctttttacaaccatgctacttataaaacccttgcatttcccaaattaattgcatacactaacatccccatttaaacagatggcttaacaacgaaaatacccctaccgaccacccttccaaacaatatcactaccttactatcaaatagtacacacccttttacaatccatta

SEQ ID NO: 2925 - DNA, 305 bp, Lilium asiatic
gatctgtgaaggtgaattcggcttacatttgcttccgttttcaatttctgcttggctttggtttaagtcttgagttgtgatgtggattttggaaggggatatttcatcttctatgacaaatctgtttgtgagatgtgatctgcctgcaactgttttgtttaatgttgaactccaacaatttagtttaagggtgtcatcggtggtggtgaaagtagatcaaacaatgtttttatgtcatcaacaaattgtcttttaactgcatcaaattactttgtagattaagttcctttacataactagcctat

SEQ ID NO: 2926 - DNA, 375 bp, Lilium asiatic
cacatttaaagcccataaatgttttaataccgactacaatccctgaaagcaaagagaaacgcgagaccatgactcaacatataatcggccaagtctattggcgcacacccatctagctctttggtttactgatggccccatggacatcacacccatatgaaaatcataggtggattgtacgagcaagtataaagatttcaggacaagaaatattaaaggcatcacaagaataaaggttaacagctcgaaaaacaaaagcatgaattgaccttgagaagataactgtgatgcatggaactataaaaaaatatgttacgatatgtgtaaacatgattgttaatcttcctttgacaaaaggatttgagcatactggat

SEQ ID NO: 2927 - DNA, 461 bp, Lilium asiatic
  modified_base (397)..(397): a, c, g, t, unknown, or other
gctggagcatcatccttagacagagaagggaagctcttggtaggctctgaatgtagtcagagaaaaagaaggcaatatgcttcggaccacacacaggattttattgttaaaaatgttcgccagactcttttcaagacaatatcttcattcaagggggacttggaagatgaaaatgaatttgaaagattgattgaggatcaatttacaactttgtacgaggcttttagattgtccactggaacaggtggtgatggacctattacagttgctgcaaagttgctcaacctttaccgtactggaaggcttgggcgttatacactggaccatgttccgagtactttgttggagcctagtagtaaataaaattttattataataggatagatacagttacggngaaaagtatttgcggccagttgatttatacacgattaagttggacaatagcaaattaagttttg

SEQ ID NO: 2928 - DNA, 405 bp, Lilium asiatic
aattcggtcgaccacgcgtcggtgagatcatacttgacatatagaggatgctctcgtacggccccgtacgtgcaacgagatagcgaatgtattatgctacctaccacacacaggatgttcttggtaaaacagctcgccagactgtattaacgacgatgtctcccttcttggtggacttggaagaagaaaacgtatttgaagcgagtgattgaggaacaaatgacaactccgatcgacgtttctacattgtgcactgcaacaatgggagatggacctattactagttgctgcacatttagctcaacctttaccgtactggacggcttgggcgccatacactgtaccatgttcctagtacttcgttggagcctagtattaaataaaattctattatcatacgacaga

SEQ ID NO: 2929 - DNA, 400 bp, Lilium asiatic
  modified_base (351)..(351): a, c, g, t, unknown, or other
caatttttgtataccaaaaggcaagcttctatagctgccaatacttgggtggtcagcggctcccgggagacaaagagactccaggatatactgccttcaataatcaaccaactcggtcctgataacttggacaaccttcggaggcttgctgagcagttccagaagcaggttccgggcggtggtaccatcccggaggaggacgatgaagatgtccctgaacttgtgccagggcagacatttgaagctgctgcagaagaaaaaacttcatagagttgctctatgacgatttactatcccttttgttaggatcctatcagtgccttaccttctggtgacatatagaacagattntcggctgctaagactctgctgcttacttttttttcatctatatgtacca

SEQ ID NO: 2930 - DNA, 351 bp, Lilium asiatic
atctcttatggagaatattctcaatgttctcaatctctcctctccagataagctaatgggttgggcctattcagatccgtcttgggctcctatcctccaacttgttcccattgtgatatcttctgccgaatctggagatgaagttgctaacaatatcctacatatctcatttctggaattggcacacagtgtgaaagcactggttcgaagactcccattgtgtggcgaagaaggaatggattctttcccacttgttatggatggaggagacctagaatacaacaatcgactgtacatatgaagagaaacctgtaaatgcctctcttactattaccccgtggtatatactat

SEQ ID NO: 2931 - DNA, 378 bp, Lilium asiatic
  modified_base (341)..(341): a, c, g, t, unknown, or other
atcatccttacacaaatatatttttctcttttttatctcccactttctccagagaaaaaagaggcattataaaactcaccagacacaccattttattcttaaaaattttctccaatactcttttcaacacaataactacattcaaacattacttacaatattaaaattaattttaaacattaatttataatcaatttacaactttctaccacacttttaaattcaccactacaacatcttataattaacctattacactttcttcaaattttctcaacctttaccctacttcaatcctttttccttatacactataccattatcctactactttattcttncactatacctaaataaaaatttattataatattatat

SEQ ID NO: 2932 - DNA, 281 bp, Lilium asiatic
cccggtcgaccagcgtcgcaatctgtgacagtggctgcaaatgtaactaaatggttatctttggcgtttagcatacgggtccactttcggagtctcatatttcgtatggtttcagcaaaatattatgtgtagcagtacttttaccttgtgtgttgcggcttggccgaacattattttgtaggggtggtccacctgttaagggctttgattggccggtctaacattgttgatacctgatcgttggattatcatgttgggttcttttgagcctgaacttattt

SEQ ID NO: 2933 - DNA, 451 bp, Lilium asiatic
tcttcttaacattccgaaaccgcaccgtggcggtctggaattttcgcggagagctaggcacctccttcgaagaccacttgctctggcaccctgattgtaatacaaataacatttatattacaagcgaccaggacctgataatatcgtactgcaaggcagtcgaagaaggcgaagatgactgtggagtttctgctgttgggtcaatcaatatgagcaatatcctcactgggaagtgcattgccaagatatgctcaactgaccgtgcacttctggttagccctcgcaagaaaggcgaccctggccgttcgtctgtacggagcacggtgaaggaagcactcgaagatgtgacagcgctcttctatgatgaggataggaatgagatctatactgggtaacaacaagggcttatacatgtttgggcgaattacgtctctgtgccggtttaacttat

SEQ ID NO: 2934 - DNA, 447 bp, Lilium asiatic
cgagttcaccggtcgagccgtcgacttattgagccggacggagtcggaggagaagagggtggccgttaacgccgacatggagagagtcaaccagctcccgcacactagtagctactatctgcaccggatgcgagtgctcaacaagctcttacatcttctgtccattaataggactttgtcacaggatgaggaattggagctgctttttgccggcctctctctgtgaagaggaaacaagggtagctagtcctcagtgctgatgggaaaatggtattaagaggtatcgtagcgcagcaatgtataaatagagtttgcaagacgaggaagcggtactgtaatataaacatgctttcctcctatgttggtaaatctgggttctttgacatcaatttccttttatgctgaaagttatattatttagagtactcttgatcgatactgaagtac

SEQ ID NO: 2935 - DNA, 119 bp, Lilium asiatic
tcgtagagaagatggtgcaggaggctgatattttcaagtctgatgacgaggagcacatgaggaatgtggatgcgaaaaatgcgctggagaattatgcttataacatgatgaacaccatc

SEQ ID NO: 2936 - DNA, 277 bp, Lilium asiatic
gacagatatatctatattagtgagtgagtgagggcattttctgaagtgtaattctgtgtttcagtatgtgactgggtttagaaaacccaaaaaggtcctttataaaactgaaatgattttcaataattttggcggttaaccttaataattattaccttggttgtgaaccattttgaagttggccaacttataaatggttaccatggttgtgaaccaaattaatatttttatatttatatatatggataaaaataaaaaaaaaaggggcgcccttttt

SEQ ID NO: 2937 - DNA, 356 bp, Lilium asiatic
cccacgcgtccgaaaattggaattcatgtcctcatggttaattttaatctgctgatgcacatattggttgtttttactatctccttgattcaaatgtgtggtaatggggtccgttgcttggttcaattggtttccgagcttgaaaatttacacgggacaccaaggtgctttgcctagcctttgccatagtggcctgattaatattcaagttagtagtaattaataattcctggttaatttaagtcctcttaagtccgaaattatctttatggtcaagctcaaaagatagcaggctttaccaattcatttgcccattttggtggttcaatttattttcataactaaaaggtattttt

SEQ ID NO: 2938 - DNA, 247 bp, Lilium asiatic
ccaaggcttccgttctagattgcgagtgtacattgtaaacgatcgatgtagacgatcgacactttcctacgcgttcatgctactatagagctatcttatagcgttacattgatcgaatttactgaacgtcgttattcaacaaaaccgtgtggtaaaacactgtagttacctagcttaacatccttgtttcacatgctgctttagtaagctggagtactagccagaaggcccttaccaatagttgttc

SEQ ID NO: 2939 - DNA, 357 bp, Lilium asiatic
ctgaaaccacaggtgggacaaaattgaaagacttcacggctactatccagacgaatgctagtatccagtctgagattgcagagctgcgcaaggaggtggaagaatatgcaaagcaatttccgacaattggatttgagaaagagacaatgaaatataaaaactgagaaaaagggttgagagcaagaggatatacattataccttcacagattcagaattatatagcagttgcaacagagtttgtactgaaacggcaaagcagtgggggagttttaagcaattgcagagttaacaaggtctcccataagatgtataactagtatgacagaagggtaacattcaatctagaagaaagtga

SEQ ID NO: 2940 - DNA, 395 bp, Lilium asiatic
ggcgcatcattaccgcacaaataaatttggttaggagatcccgttacttcattcagggagttgtctggctttagatggggggcgtaatcttgtatggttgaatacgcatctctggcattcaaactgaagcttgactacccaaatctctttgggatgaaatgattgatatcaactggacgctttgatattctcatttagagagttcgtgtttgaatccaattatctgcacggatttttactaccgtcattctcagtctctattaatgtaatgtactctacgataatatcttacaaatagacacctgacaactttggtgttctatattataacatcattagtttgtatcaattactaattttcaataaacgggatttcctttctttagattcaagtt

SEQ ID NO: 2941 - DNA, 269 bp, Lilium asiatic
gcagaagaaataatactcagactaacacgtgaagttcacaaaacttttatacgtaaactgagctgtagatgaatgcattaactacagcattccaaataagacgaaacgaaactaaatcaaaagtaattgaggtgccttcttcactctgacatccggcaaggacctgccacgggttcggacggctcagcctccagtgaggctcagacgatgaagtcatgtcaggcgtgttgcctcgacattgatggacattttgttatgggtactcttga

SEQ ID NO: 2942 - DNA, 378 bp, Lilium asiatic
cctctgcagaaatgtcagctgccgagctagcccccgccccagcccctgccaaggtggcgcaagcctaaggcgccaaagaagacctccgctccaaagaagcctgcagcccatcctccctacatcgagatgatcagcgaggcgatttccacgctgaaagagcgtggtgggtcgagccagtatgcaatctccaagtttattgaagacaagcataaggctcacctcaccggaaacttcaagaagctccttctcgtccagctcaggaagtccacagctgccggcaagctgactaaggttaaaaactcttacaaagtggctgtgaaaccagctgctgcaaagaagcctactgcagccaagccaaagtctgccgctccgaaggcg

SEQ ID NO: 2943 - DNA, 244 bp, Lilium asiatic
ccacgcgtccgcccacgcgtccggcggaagtactggtttgcctaagggtgttatgatgacacatggtaatattctagcaacagtctctgcagtgatgacgattgtccctgctctcggcagtaaagatgtgtatttggcatacctgccactggctcatattcttgagttagcagcagaggctgtaatgattgctgcaggaacttctataggatatgggtcgccattgactctaactgacacatcc

SEQ ID NO: 2944 - DNA, 263 bp, Lilium asiatic
tccgttcggataccttctcgaccacgcgtcgcagcgtccgccagcgtccgcggagtactggttgcctaaggtgtatgaggcacatggtatattctacaccagtctctgcagtgatgacgatggtccttgctctcggcagtaaagatgtgaatttggcatacctgccactggctaatatcctggagttaccagcaaaggcttgaaggatggctgcaggacctcctataggatatgggccgccatggactataactgacacatcc

SEQ ID NO: 2945 - DNA, 375 bp, Lilium asiatic
ctcagggactgctgcagccaaagttgccgatctgagcaggaggatcggactgactgatgaaatgtcctacagtgttgacaccggtcgctacgcggacgagaggtatggcgatatagacaccactaagacagcagtggccgctactgcgaaaacagctgcgtaggccgccaggtctgttgtaaacagcagctacttctgtgcctgagctctttgcgtatctgatgcccttacaagggctgtcaaagctgcagcagattttagcaacaatgcgaatagacagtgagttggactgaaaagtgaattgtcactactgttggcgcgtacaaatacaatgtgctttgctgtgtattgtataccggataacttgctcgttta

SEQ ID NO: 2946 - DNA, 337 bp, Lilium asiatic
tcgcggacgcgagggctccttacctgatttctactcctggactactactcgctaactccgtggactatgaagaagacctgggcgatcatagtgaaggctccgtgggaagacttcaagaacacacgcatgaatgaactttcagctacaaagaacccttgaggccaagccaaacagcctctcaaggaagttatgtgtgcacaacatgccattacattcattgaggtattgtagatgtataggcgcgtactggtctataaaggcatgccatttaaatggactatggcgctgtcctatgaaacttgtcaaatttattttggatcttgtcaagaatgcttat

SEQ ID NO: 2947 - DNA, 415 bp, Lilium asiatic
agcattttcccttgtttgcaattcgtttagggttcgagcttgtaagcatgattgtctccaaggaccatgatattcgtgagagatttgctggagaagatcaaccttccactcttcatttctcaaacactgcagtaattcgaggatctgctttccaaagatttcctccagacttactcaggaagattactactgattgtctagccatgcaaaatcatatgtatggtttatctcctaaaaggttgcaagacagcgatgcgctatctaactttttcaagattctgacgacaactaacgatgaaaataatgaggcttacatctctacagcacatgcatacaactatcccgtgactggcttccagtggcatccagagaaaaatgctttcgagtggtgttcaccaaacattccgcacaccga

SEQ ID NO: 2948 - DNA, 315 bp, Lilium asiatic
cccacgcgtccgcagcttgaaggagaagggaaaaattctcgaggtgttgaagaactggccagagaggagtattcaggtgattgtggttaccgatggcgagcgcattttggggcttggagatcttggctgtcagggaatgggaattcctgtagggaagcttgcactgtattctgcacttggaggaattcggccttctgcgtgcttacccatcaccattgacgttgggactaataatgaggagctactgaagaatgagttctatattggattaaggcaaaggcgggccactggtcaggaatatgctgatctacttga

SEQ ID NO: 2949 - DNA, 388 bp, Lilium asiatic
cggacgcgtggagagaatgagtttggtagagaatttctgggttgtagagaaatgagtttagtagagaattatgatgcaatgtgtaggcctgttgggaaggctgcaggttgggagactttgtagtagtaatgacttaattgtaggcccggagaaactgtagatccattacactgaaccacttgattaagttgtagctttgactctctggaaatgagtgttaattcttttttggataagaattgagcaatttagtttttggtctaaaaaaattattttttatttatatattttgtttgtttgtatatatgattctttgtttttttatttttgtgttgtttgtttattgtttttttttgtttgctttaattttttttattttactgttttt

SEQ ID NO: 2950 - DNA, 357 bp, Lilium asiatic
ggcgaccgctgctcccgcctccacacttagcccagcatcagccccaccctcctcctatctaacatgtaccagcgccccgacatgatcacccccggcgtcgacgctctgggccagcccatggatcctcgtaagatccaggagcacttcgatgatttctatgaggatttatttcgagagctaagcaagtatggcgaaattgagagcctcaacatttgtgacaatttggctgatcacatggtgggtaatgcgtatgttcagtttagggaggaagagcacgctgccacagcacttagcaatctgactggaagattgtatgcaggtcggcctgtcattggtgatttctctccggttacagat

SEQ ID NO: 2951 - DNA, 135 bp, Lilium asiatic
atagagatagagaaagggattgtggctcttaaccaggataaggagttgtagaacatgagaggttttatgctgcagtaggccaacacatcgtatcacactgtgattgtatggctcaccgttaatgggatccccatc

SEQ ID NO: 2952 - DNA, 480 bp, Lilium asiatic
gaagagaatgccaaagctatttcccttttttagggtgttgttcggcttaatgattcgattgaatatgagagcaaacgtgtgtaaaacttagttagaggaatgttgtctgtaaacatatttgattttttatcagtatatcttgcttattattttttattggttttttacttttctattttgtatgttttataagttttttatttattattttttttttttttttttttttttttttttatattttctttctttttttattttgttttcttttttttattttcttttctatttcttttatcttatttaattttattatttttattttgattttaattctttttttattatattttatttttcttttttttttatttttttttattatttttgtttcttttttatctctttatattaattttttttattttttttattttattattttattttatttttttttttattttctttttttttatt

SEQ ID NO: 2953 - DNA, 333 bp, Lilium asiatic
gccgtggtgagcgtgatccggtatctgcctctgatcttgatgctgatctcgagaagtaccatcaggaatcgatgcagattaactgagttttcacctggatctttagtgtgttgctgttgcttgctcaatactgctacatgcttttatctatttctgcaatcatgctactttagggaacacaaaacattagcctgagtgctttactggtttatatggatgtttgaaatgtactgttatttatccatttgctttcaacattctacttggttaaatggctatttggtggctgccgtaagtggttaatcaattcggtggcccacatgtatctctctt

SEQ ID NO: 2954 - DNA, 146 bp, Lilium asiatic
ccggtcgaccagcgtccgcacaagaaacaggcgacgaggatcgactgcaccggattttttaggcgccgccggatatggcggatggggcaaccggccgtccgaggggccgttcttggattggtcgaaccaggttaacatttcttaat

SEQ ID NO: 2955 - DNA, 268 bp, Lilium asiatic
aaaaaaaaaaaaaaaaaaaaaaaaaaaaaaaaaaaaaaaaaaaaaaaaaaaaaaaaaaaggaaaaaaaaaaaaaaaaaaaaagaaaaaaaaaaaaaaaaaaaaaaaaaaaaaaaaaatataaaataaaaaaaaaaaaaaaattaaaaaaagggggggaacgttaataaagtgtcaagtttttttaaaagggtggtgactggaaaaaactttttttttgggagcttaaaatgaattttagggggggtttttttaaaaagttggcttggt

SEQ ID NO: 2956 - DNA, 300 bp, Lilium asiatic
tcgcaattttgtgacagtgtgctgcaatatgaaactaaatggttatatctttggcgtttaccatacgggtccactttcaggagtctcatattttgtatggtttcagcaaaatattatgtgtagcagtacttttaccttgtgtgttgtggcttggccgaacattattttgtaggggtggtccacctgttaggggctttgattggccggtctaacattgttgatacctgtttgttggattatcatgttgggttcttttgagcctgatcttatttaaaaaaaaaaataaactgacaaataata

SEQ ID NO: 2957 - DNA, 318 bp, Lilium asiatic
accacgcgtacgatccaaactacgagccagtcttcgccgggccaggcgtacaaccaggcggacagcgatctggacagggaggtccagcatctgaagaaggctttcgaggctgagaaggaaagacttgatggcctgaggcttgctatgtcgccttgactttgcttttgccatggtatcactaactaatgggtgtcaaatatattagtgtggtggcttgagtagtttctttagtactactagtgaaaccctttgttcttttcggacattaatatgagagctggtttcagactttaatgctagttggccagtggtatgtat

SEQ ID NO: 2958 - DNA, 378 bp, Lilium asiatic
cccacgcgtccgctctgttgagccacttctttctccacccctcctctctgccctcacggcggttgcttcctcgcctgcggcggcggctatgaggaccgcaagcgccgccgccgccggagcaaccgatcgccgtcgccgcagcgaaacgagagatacatccctcgccgacggagtccttcaccgaaacggctggctttggaggctgtggactcggatctgaggtatcgtctttttctgtgaactgtgttgctgcttgtatcatctgtttgttagtctatgtgtgattgtaaggagtttttgttgatttgggatgtcttgctttgtaagataatggtgcatgctaagtgtttggtgttgtgccatgctcatgattcagtt

SEQ ID NO: 2959 - DNA, 407 bp, Lilium asiatic
gacgccaccggtctccgccacatcaacgtcggcgacctcgtcaagtccaagaaccttcacgacggttgggacgacgagttcgactgccatatcatcaacgaggacctggtatgcgatgagttggaagatgcgatggacgagggtggcaacatcatagactatcatggttgtgatttcttcccagaacgctggttcgactgcgttgtggtccttcagaccgacaactctgctctacatgatcgcctgacaaatagaggctacacagggtcgaaactgacgaataatatcgagtgcgagatctttcaaggtttgctcgaggaggcaagaagcagttacccagagaatatcgtgatgcctttgcgaagcgactgtgttgacgacttcagccagaattgttgcatactagc

SEQ ID NO: 2960 - DNA, 420 bp, Lilium asiatic
gagtgattagtcaacaattcaagtttggtaacatcatttctatcagttaaataacatatatggttggaaattctatgactaacatttcaatagtcctcattcccgaggattttatttaaaatcattttcagtatgtatgtgttgaacatttaatttgatggtatttttagtagaaattgagtaaaacatgatcagaaaatataaatatgaaataataatatatttaaatgatattttcatattattttatgaagcaagagctagttcatagaaccgttaatgcctagttggcttaggaaacccaaattgaagatggtcaataaagatgtataaactataaacatcatatgtttgtgagttttgttacacacgctaattcgccatgtatataaagttccaacattgtatcccatatgatgt

SEQ ID NO: 2961 - DNA, 170 bp, Lilium asiatic
  modified_base (29)..(29): a, c, g, t, unknown, or other
cggacgcgtgggcaagcctgtgaaatctnccccagtttacattagccctcttgacttggggcccaagtatgtgtgagaagatggggccaggcttcaaggagtactgcaagacgtacgatgagaactactgtttaagccagttgatggattggcacagcagccaacccaag

SEQ ID NO: 2962 - DNA, 304 bp, Lilium asiatic
acgcaatcttcactccccttacaatgggtttctcctattcagcttcttacatccgaatcgtgtcgcacttgatcgagaagggtctacacttcaacatgaataaggaggagtgcatcgaagcgctctctaagcacgcctatatcaaccctgtcatcacctccacagtgtgtaaggagttacagaaagagaacactgaattcttctacgcatacacccgaatgggcactgagcgtgcgactgacatacgataccatgaagagaatccataccatgttaatggagaccgcagctagggtttcagatg

SEQ ID NO: 2963 - DNA, 313 bp, Lilium asiatic
cgcatctccaattctcgggttgccgcagttgggagtgaggggtggaagagttcggtgctcggcagtaccggagaaggcggctggacatggcaaggcagctggggcagcaattctggcagcggcgacaagcgtgatgtcaagccccgcactggcactggtggacgagaggttgtccggcgaggggacagggctgccctttggtctgagcaacaacctactcggatggatactggtgggagtgtttgggatcatctggtccttctacttgtggacaccaacttccttgaagaggatgaggaatctgggctttccc

SEQ ID NO: 2964 - DNA, 309 bp, Lilium asiatic
ggaatgatgaggagcttggccggttgctgcttggggtgacgattgctcatggtggtgtggtgccaaatatccattctgtgttgctgcccaagaagcaccaggacaagtctaagaagggggacgataagaatactgcttctcaggaattctaggtttttttagagttaattgagtatgtgcgaggatgcatcttgtgtctggcagagtatgtttactatagggatgtaacaaagtggacttctttgacactgtttgaagaatttgtctgcaaatccaagttcgagtaatttattcttcaaaaaaaaaata

SEQ ID NO: 2965 - DNA, 264 bp, Lilium asiatic
cggacgcgtgggcggacgcgtgggtgaaggtggctgctggattcaagcctttcaatgttctctggtttgtttttgttatttgaatagaaagatgtcgggactttgttctttggaactgtttgttttctttctgtacaaatctgggatcggttacggttgcactctctagttatgtatctgacgttttaagttaatttttcattagagcatgtacatcagaccgtggacgaaaagtgcttctaagtctggtagaacaagcacaat

SEQ ID NO: 2966 - DNA, 167 bp, Lilium asiatic
aaaaaaaaaaaaaaaaaaaaaaaaaaattagaaaaaaaaaagtatgaagatataaaagagcaaaaaattaaggacacattgatactactatataagatttaatataaaggtacttaaattgaatataatgtccgaacttttaaaatgtcgagactgttaaatctttt

SEQ ID NO: 2967 - DNA, 355 bp, Lilium asiatic
gctgtttgcattggatttatcttcccagctgctgtaaccctcagggattcccatggggtagcatcgaagagggataagatcttgtccgtatttatggttgttcttgcggtgatgtccaatgcagttgctgtatatagtgatgcttactccctctttaacaagagtaagtcctctcattcttgagctgtgggatcatgggctagggtcaatatatttagcttggtttgatgtgaatatttagaggcccatgggagttgagtgttattagcttgttttgtctaataagatgtaatgaacttaatttataggttgagttaaatgtggaacatacctcatattaaattatatatattcg

SEQ ID NO: 2968 - DNA, 300 bp, Lilium asiatic
ccctgagggggttctggttgcagaagtggatgaactcagagaaggcaaaagattgcacatcgaggatagattacctcttgagcttagtgcatagtggcaaattcaaatatgagatggaactggatcccttcgaagattttaacttggcactggacaaggcacttgggaagcaaggcattcagcccaagcaggttctcatattctaatataatggcgccatgttcaatcactttagtgtccatgaagcatctatcaaatgtaaggttcctgttatacttggcagaacatgcttgtattttt

SEQ ID NO: 2969 - DNA, 180 bp, Lilium asiatic
acgattttgggctatgttgatgaggacttttttttcactgatttcctcggcgatagcagggggggcttttatgatgccaaggctgtgatcgttctgaatgattactttgtcaagctcgtgttcttggattacttcgaatggggttacagctaccgcgtctttgatctcatccggcacatt

SEQ ID NO: 2970 - DNA, 80 bp, Lilium asiatic
aaaaaaaaaaaaaaaaaaaaaaaaaatttaaaaaaaaaaattaaaaaagaaaaaagggggaaaatataaggggaactagg

SEQ ID NO: 2971 - DNA, 119 bp, Lilium asiatic
agacatcaaagatcttgctcctcaccgtctagctgaaatacgccgcttctttgaagactacaagaagaacgagaacaaagaggttgcagtgaatgactttctcccagctgaagatgcca

SEQ ID NO: 2972 - DNA, 245 bp, Lilium asiatic
  modified_base (1)..(1): a, c, g, t, unknown, or other
nccacgcgtccgaacaccggcaaaagcttcatcaaggtacatctatctactctcttgtcccctttatgtcttatttggattgttatgtgtaggattttggaaaagcttggatttgtgtggcaaaatgaggaaaggatcaaagctcaagaaggaaaagagatgttgcaagcttgatgaggatgtgctctcggatctataagtacccctcctcccccattggattggaaagaggtctcactccggcc

SEQ ID NO: 2973 - DNA, 235 bp, Lilium asiatic
tcggagaaactaacagatcctcactcgcagtcatgtcgctcgtcgccaacgaggatttgcgtcacattcttcgtgtgctcaacaccaacgttgatggtaagcataacatcatgttcgctctcacctccattaagggtatcggccgtctatttgccaacatcgtctgcaatgaaggctgatgttgacatgacaaatagggctggctagatctcatttgctgttcttgtgaattaga

SEQ ID NO: 2974 - DNA, 326 bp, Lilium asiatic
  modified_base (292)..(292): a, c, g, t, unknown, or other
gggtgctgatcctgttgcagcagcccctgagggtgattgggcagcagcccaagctggtcaattggttgatggtggctgggatatggttgcaccaccgcctactgctgctgtccctactggatttgaggctgctgcaccagtggacggtgctgtctcaagctgtgagtagatggaaattggtattcttgccatttaccaattgaagtattttctttagatttattttcaaatgtttcttaaggaaaacaagccccttttggtagtaagtggacttctcttaaatcaggtactntgatgcttttaaagtttggtgaaagctgtgaact

SEQ ID NO: 2975 - DNA, 204 bp, Lilium asiatic
ttcgactccacgcttcctgtcaagaatcgacgtcctgctagagcttcgaaacaatttaagtgagatccattacagagagattacactgaaagagctagtgcatgagtaagaacattataaagttgagatttacacactaaaatatctatttgattaaactattaaggagagggaacaacaactcgtcctccttggtgataaaag

SEQ ID NO: 2976 - DNA, 352 bp, Lilium asiatic
  modified_base (341)..(341): a, c, g, t, unknown, or other
cccacgcgtccgatcggatcgggaaaactgacgtggcagtctatgatggatcttggaccgaatgggggtctcaccctgacactcctatcgacactgcggtttaaattatttgatctggttatgttttcttaacagtgataatatcactaaatctgactgttgtggaaatgtttcaatccaaatttgtaaatgagttattttgagcgaaggtacatttaaatcattttaaagattattgacagcaatctgctgtgtttaatgagttttataaactgaagattattgacattgatctatcttgtcttttgaattactcccctatttttttttaatggtgcaanttaattatgtc

SEQ ID NO: 2977 - DNA, 266 bp, Lilium asiatic
tggacttaagcttgtcaagcttagatgagaggccatgcaggatgcttcagatgctgctagtagtgccatggttagtattataggattggattcagagaaggttcaattgttgtgcgatgcagcaaatgatgaagtagacgagaaagacagagttcagattgcaaactttctttgtccaggaaattatgctgtctctgggggtgtgaaaggagtggaagcagtagagtccaaggcaaagtcatttaatgctcgaatgacggtgcgtc

SEQ ID NO: 2978 - DNA, 250 bp, Lilium asiatic
aaaacttgatgctttgtaaaagttgttgaagattgagtgttaagtttgaatgagatagagttgaagagtatgtgatagatgtatgttgtttgaatggtgataaaaacttgatgctttgtaaaagttgttgaagattgagtgttaaaaaaaaaaaatattattatgtaaataatatttataaaaatttaaatataaatttttttaataaaaaaattattggaaaatattaaaaaagttggtggtcttttag

SEQ ID NO: 2979 - DNA, 175 bp, Lilium asiatic
tcgcaggaatcccgatgaacaccgccacttaattcccttttgggatggttggcggcacgccggtgctgcttgcgaagccgcagacttacatgaatctcagtggggaatcggttgggccacttgcagaatattataagctaccgccaaatcgaattctaatggattttgatgatat

SEQ ID NO: 2980 - DNA, 336 bp, Lilium asiatic
tcgtttcaagaaaaatatcagttaaaagtataaatgttttaattatcaatagaatggatacttttctcatgaatgatatgaaccaaagaagttaaacatcattaatgtaatttttaatgttttatatattttaagatcttttttctagttgaatctcatcctttatggattatagactctggaaataaaatcatatagcaaaatattataatgctttctttgaatattgtataatcctataatgagcgagttaaatatttgtggaaaataactcaagtgttataatttaaggaattaatacctttaaaaaaaaaaataaaagtcttgccggtttta

SEQ ID NO: 2981 - DNA, 351 bp, Lilium asiatic
atttcaactcagagagtgctgaagagatggaatctggaaagataggcaagggtgctgccggtcgcaagggcggcgcaaggaagaagtccgtcccaagatcgatcaaagctggcctccagtttccggtaggccgcatcggccgctacctcaagaagggccgctatgcaaagcgcgtaggctccggagctcctgtctaccttgctgctgtcctcgagtaccttgctgctgaggtgctggagctggctggcaatgctgccaaggataacaagaagtctcggatcattccgaggcacgtctgccttgctgtcaggaacgaccaggagctgggcaagctgcttgctggagtcacca

SEQ ID NO: 2982 - DNA, 415 bp, Lilium asiatic
gtcgaaaacaaatgcgcaggcaatgttcaatcttggctacatgcacgagcatggcctgggccttccattagatcttcacttggctaaaagatattatgatcaggcccttcaaagtgatcccgatgctaagttacctgttacacttgcacttgcgagcttgtggatccggagaaatcatgcagacagctatctggttgaaataatcgattcacttccccaaatctaccagagaattgagaactgggtggaggacgtgctcttggacgaaggtaatgcgactataataaccctattcatctgcctcctgactgtcctctacctgcgtgaccgacacaggcgtcaagtcgcagccgtcgttccgcagcaacccgacgatgctctgaactagagaacaaatgatttgataactgagtta

SEQ ID NO: 2983 - DNA, 421 bp, Lilium asiatic
ccgtggcgctgcaaacgcagggggtgaagacagaaaaatgggccgaggaggatgatagagagatcggaggggagttcggcggggtgcagaggctgtgggaggggaccgtcctcgactgcctagctgatcgccggatcgcgattgagtcctccttttgcccttgctatagatttgggaagaacatgaggagagccaatttggggtattgttttcttcagggatctgtgtatctgcttcttgcaatcgttattctgttccactttattgtgtttggcattaccaagcagcattgcttcttatacgctggagtggcttcaaccattgtatttggactttatatgggttactaccgcagtaggattaggaagcagcttaacgtaatgcgcaacgacagtttcatagacgactgcatgagccatat

SEQ ID NO: 2984 - DNA, 301 bp, Lilium asiatic
attcgaagcaaatcagcgatgtcgggtcgaggcaagggcgggaaggggctgggcaagggcggcgccaagcgccaccgcaaggtcctccgggacaacatccagggcatcaccaagccggcgatccgccgcctcgctcgccgcggtggcgtgaagaggatcagcggtctcatctacgaggagacccgtggggtgctgaagatctttctggagaatgtcatccgcgatgctgtcacctacaccgagcatgctcggcggaagacggtgacggcgatggatgtggtgtatgcgctgaagaggcagg

SEQ ID NO: 2985 - DNA, 325 bp, Lilium asiatic
gaggaggcaactctgaacctgaatgcgatgaaccagctgaaggggaagaagccgtggtcactgtccttttcattcggacgggccctgcagcagagcaccctaaaggcttggggtgggaaggtggagaacgtggagaaggcgagggctgcgtttctggtgaggtgcaaggcgaattcggaggctactctagggacctacaagggcgatgctggcaagggggagggtgtgtcggagagcctccatgttaaggactacaagtactgatgctaatgttgtctggtatcgactttggttttgctcttggtcttgagagtgataggtagtg

SEQ ID NO: 2986 - DNA, 247 bp, Lilium asiatic
atcacgcgtacgctctctttcccttcacaattcaactttaccatccctctctccacttccgcgacttctcagcctaaactccggacatctccctttccaccaccaaatccgtaacctctccaccggctttgaagcaaaggtatgcatcccacctatcttgtccctattattcttacttaggtttattcatgtatagggacctttgagaaggctcggatttggggcaagatgatgatcgatcaagaca

SEQ ID NO: 2987 - DNA, 124 bp, Lilium asiatic
atttgttaagaagggattttatctgaaagggctgaagatgcacaacgtgtggccatcgtgcgccgagaagcactacacggatctgtccttaaagcccttcttcggcgggctggtggagtatatt

SEQ ID NO: 2988 - DNA, 261 bp, Lilium asiatic
gatggtttgaggaaacatagggcagatggaaagtatgtgccagacaccaggctttgaggaaggcaagaaatatgttcgtagaggcgtgtttgggagtgactatatatgagttactctcaatctatggacggcaacaaatgctttggtcgagcaaattatattcgtggtgacagggacattcccagcattatagattgacaagagagagactattaaacctacaaagatcataagacatggacccatgatgtatatcttgaa

SEQ ID NO: 2989 - DNA, 378 bp, Lilium asiatic
caccatttccggccgcccatctcgatccgatggctgtcttctccgatctccacaccgagggcggcctcaaaaccctagacgagttcctctccggcaaaaccttcatctccggagatgagattaccaaggatgatgtgaaggtttatgcggcagtgtctttgcccggtgaggggttctctaatgtgtctcgttggtatgagaccgtctcttcagctcttgcagtgaggtttcctggcaaggctgctggagtgaatattggtggacaagttccaccgtcggaacctgcaccttcgtctgaggctacaaaggtggtggccgaagaagatgatgatgatttggatctctttggtgatgagactgaggaggagaagaggcagc

SEQ ID NO: 2990 - DNA, 321 bp, Lilium asiatic
gatcatcagccgatttgagaagaagggattctatctgaaagggctgaagatgcagaacgtggagcgatcgttcgccgagaagcactacgcggatctgtcctcgaagcccttcttcggcgggctggtggagtatattatctctggtccggtggttgcgatggtgtgggagggaaagaatgtcgttgtcactgggcgcaagatcatcggggctaccaacccggcggagtcggctcccgggactattcgtggggatttctcgatcgagattggaaggaatgtcattcatggtagtgattcagtcgatagcgcaaggaaggagat

SEQ ID NO: 2991 - DNA, 305 bp, Lilium asiatic
tgctatggtgctatgtgggagagggtgtgtagagatgctggaaataacttaccgggatggtgcttaaggtgagatgtgatatgggtaattgtagcaatagggaggggtgcagtgacattgtgaagaggtgttgtgtgtggagtgatgtgtattgcgggaaaattattatgatgttatggtgtgagttatcacaatgaagaagaagttgtaggtagtgaagcaatggctatggatttgttggggtggtgttaaagcacttccataagaattcggtacgaaaaagaacgcattgcacatgtggtata

SEQ ID NO: 2992 - DNA, 306 bp, Lilium asiatic
agatgtctcacaggaagttcgagcacccgaggcatggttccctcggattcctccccaggaagcgtgcatcacgccaccgcggcaaggtgaaagcatttccgaaggatgacccatcaaaagcccctcatcttactgccttccttggttacaaggctggaatgactcacattgttcgtgaggttgagaagccaggatcaaaactccacaagaaggagacttgtgaagctgtgacaatcattgaaactccacccatggttatagttggagtggttggttatcttaagacaccacgtggccttcgctctc

SEQ ID NO: 2993 - DNA, 265 bp, Lilium asiatic
cccacgcgtccgatgctcctgactgttcatgtctttgctcacgacaaaaccagacaattacaatgaggtgaactcaaatattttccgtaccaaagcaaaaactctggtgggccttttttaaggaagaattggttctgttctggagaatgttaacttgtgtggcgcacgtctctaaaacatccaaggcagaagaaggtttgcactagtacaccgcattttacggattgttttgctttcattaagcttatattttaagccagttttc

SEQ ID NO: 2994 - DNA, 300 bp, Lilium asiatic
gtttgttttcaaaacagctgagatggagaccggatccaaggccaagaagggcgccggcggacgcaagggcggtccaaaggctaaatcggtgagtcgttctgtaaaggccggacttcagtttcctgttggcaggattgggcggtacctcaagaagggtcgatatgctcagcgtgttggttcaggagctcctgtctaccttgctgccgtccttgagtatcttgctgctgaggttcttgaattggcgggccaatgcggccagggacaataagaaaaatcgaattggggcctgaacatgtgtgt

SEQ ID NO: 2995 - DNA, 220 bp, Lilium asiatic
gatcatcagtctattcgtgaagaaggccttgtatctgaacggtctgataacgcagaacggtgtacgaccgatggccacaaagcactacacggatctgtcattgaagctgttattctgcatgctagagaagtatattatctattatacaaaggccgtgatggtgtgatatgtaatgaatgtccatgtcactgagcgcaccatcatatgcgctaccaacaca

SEQ ID NO: 2996 - DNA, 333 bp, Lilium asiatic
atcaccgtttccatttcttctcccgtccctttcagccatggtgaagtactcgagagatccgtctaattccaccatatcctgggagagcatggtgagggatctgagggttcacttcaagaacacacgcgagactgcatttgcaattatgaatatgcctttggccaatgcgaaacggtatctcgaggatgttattgtgcacaagcaggccattccattcatgaggtattgtgtaggtgttggccgcactggccaagtcatggcatgccattcaaatgggcaaaggcgctgtcctattaaatcttccaaatttattttgtatctgctcaagaatgc

SEQ ID NO: 2997 - DNA, 297 bp, Lilium asiatic
tgctatggtgctatgtgggagagggtgtgtagagatgctggaaataacttaccgggatggtgcttaaggtgagatgtgatatgggtaattgtagcaatagggaggggtgcagtgacattgtgaagaggtgttgtgtgtggagtgatgtgtattgcgggaaaattattatgatgttatggtgtgagttatcacaatgaagaagaagttgtaggtagtgaagcaatggctatggatttgttggggtggtgttaaagcactccagaagactcggtacgtaaaagaacgcattgcacatgt

SEQ ID NO: 2998 - DNA, 388 bp, Lilium asiatic
accgcctcctctctcgcaagcaatttgtcatcgacgtgttacaccccggtagggcgaatgtctcgaaggcggagctgaaggggaagctggcctcgatctatgaggtgaaggacgctaacgcgatcttcgtgttcaagttccgcacgcacttcggagggggcaagtctactgggtttgggctcatctatgataatgttgagagtgccaagaagtatgagcccaagtaccggctcatcaggaatgggctggctactaaggttgagaagtcaagaaagcagatgaaggaaagaaagaaccggactaagaaaatccgtggtgtcaagaagaccaaagctggagatgctgccaagggagggaagaaagagtgaacaggcacttttactatcat

SEQ ID NO: 2999 - DNA, 302 bp, Lilium asiatic
  modified_base (124)..(124): a, c, g, t, unknown, or other
  modified_base (171)..(171): a, c, g, t, unknown, or other
  modified_base (200)..(200): a, c, g, t, unknown, or other
tcggcttccactcgttctgtcgtgatgccccactctggaccacgaagcgttggtcttattgtctgcaagggaggacctgggccgtctcagtgggtcaaggctgctgctatctgcttctaaagangaaggccttaaggggtgattttgtttgtgttatctacctgctttatntggtgttattttttaaacgtgagacattntgttgctttgagcttgtttactgtccgttggctttgtttgcctgtgatactcttttttgctgagaacctagaattattatgctatgcttggttctttttgct

SEQ ID NO: 3000 - DNA, 168 bp, Lilium asiatic
gaagaagctcacgcatgagctacctttgtaataattagggtttcactcacgagtagcggttgagtggtgttatgtatgcctctgttggatatgtgtgcacgtgtattgaatgtttgtttgtaattcatatgcagtgatagttatgatttttaatgaattgtctctttc

SEQ ID NO: 3001 - DNA, 311 bp, Lilium asiatic
cccacgcgtccgcttgaaagtggatccagttcagatgttgaatctaagtataagaagatttatgaggatgatataaacccctttgctgctttttcgaagaaggagagggatcaaaggtataaagatctcggtttccgggacaaaattacattgagcagtggacgatttcttctgggtaacaaatacgcccgaacgtttatatttttctactccattggcttgcatctccttgtgttcacatgcctgtaccgaatgtcagctttgagctatctcagcacaacgcctggccatgatgaggcttttcttgatgc

SEQ ID NO: 3002 - DNA, 294 bp, Lilium asiatic
agcgtcggaagccatgctagtgaaacatctcagatatggtgtcaactgggactttaactgtactatgctggttgtgttgaatttctgctgtacatgtctatcaatatgtattccgaaggttgtcagaaaatatcaatatttgcttttattgattttctggtagagtttatggtcttgtcgttgtaagctaaagcaaaatgatgttttattatgggtcgaagaaatgtcaggtatgttaatacattatctataatctgaggtgccataaattggtgtatggtaattccttcatcc

SEQ ID NO: 3003 - DNA, 401 bp, Lilium asiatic
atcaccgcttccatttctcctcccgtccccttcagccatggtgaagtactcgagagatccctctaatcccaccaaatcctccaagagcatggggagggatctgagggttcacttcaagaacacacgcgagactgcatttgcaattaggaagatgcctttggccaaggcgaaacggtatctcgaggatgttattgtgcacaagcaggccattccattcaggaggtattgtggaggtgttggccgtactggccaagtcaaggcatgccattcaaatgggcaagggcgctggcctatgaaatctgccaaatttattttggatctgctcaagaatgctgagagtaatgcagatgtgaagggcttggatgtcgatgctccttatgtatctcacattcaaggtaatc

SEQ ID NO: 3004 - DNA, 358 bp, Lilium asiatic
gaaagagtggctctactgggatatggagctttagttcaaagctgtttggttgcagcttccgggatggcgcagcacgggttgaaccttacggtggcggatgcacgtttctgcaagccgcttgaccgatctctgatccgcagcctcgccaagtcacatgaggtcctgatcacggttgaggagggatccattggaggctttggatctcatgttgctcatttcatggctattgatggccttctcgactgcaatataaagtggagacccttggttctgcctgaccggtacattgaccatggatcgcctgctgatcagctggcttatgccggcttgactccattttatattgcatcatctgttt

SEQ ID NO: 3005 - DNA, 94 bp, Lilium asiatic
tgctgatcttctacgtacgatatggaggattcagactcacgtactcactcatgcgactggggctcaatgctatactgtatactgagtatagtta

SEQ ID NO: 3006 - DNA, 316 bp, Lilium asiatic
tcttcttgaaaggatttttgtactggatccagaaaagaggatgaccgttgctcaggcattaagtcatccattcatcacgggcaagtgaattatgatgctgccttatgatctattctgaaatagcccatctaatccttcggcatttttctttcttttccctgctgtactgaaccatgagcattgtttccaaattcgcaacgtggataaagcgtggggcagtcgatttaaagaccttcctacatggcagttcttatcagtgggatgtgttctggtctcttgggttcgtccagggctatgatgataacacccatgtttt

SEQ ID NO: 3007 - DNA, 245 bp, Lilium asiatic
cggacgcgtgggaaaaaaaaaaaaaaaaaaaaaaaaaaaaaaaaaaaaaaaaaaaaaaaaggaaaaaaaaaaaaaaaaaaaaaagaaaaaaaaaaaaaaaaaaaaaaaaaaaaaaaaaaaaaataaaaaaaaataaaaaaaataaaaaagaaagtccttttacaaagataaagactgaaaaaaccaaagacattaccgaaataaataaataaaaaagtaaatcaaatttaaatacaaatgagaaa

SEQ ID NO: 3008 - DNA, 368 bp, Lilium asiatic
gggagagcgaggtgaggagagaggtggagaagctggcgagggtgaagggtgcgatggaggagaagatggagccgttggagcggcaggtgagggaggtgtttaggagaattgtgagaaacaggactgaggggctcgattcatcgtcggcgcagaatgaatgcttagacagggtgtgatctgaatgctagctgtagttagaaaatgcagagaagtgttgtgaatagcttagttatactgaaaatatgttggatatttctgtttaggcttgtaattgacggattttgttgtagatcagattcatgtgctcagaatctgattctaatttgttatcggaacaactgatttaagtatgagattggattttgttt

SEQ ID NO: 3009 - DNA, 443 bp, Lilium asiatic
caagcgttcggaccaccacgacattctacatgctttgtggatgccttggatatgctgcgtttacgaacagtgcacctgggaacattctcactggctttggattttctgaaccttactgtctgattgacttcgtcaatgtctgcattatagtgcatttacttggtgcatatcaagtatacacccagcccgtatatcgcctaattagaagaatggattgccagtagatacgctaacttagcatttgctcactattagcgacctttgatgaccacaggagacttccatttaccatgcattcattgacgattggtgtggagggtactcttagagtgtccagtacacttgctagcgttcttacggcctgtttttttggtttttttccttactttgtcggcatgtttcggctggttttcctgtttagctcttaatttgggggttccttt

SEQ ID NO: 3010 - DNA, 366 bp, Lilium asiatic
tggtaaaagggtgcagacggggaggttacagatggagtagaaggagatggaattgtggtgatgtttacggaggatccggagctgcccggaagacgcggtatgcaggaacgggtggaataccgggtctcctacagacccggcatgcaactggtggcacgattattgaaggcctagtaactctatcaaaggcacagagcaggaggagggaggggagcggtgaaattcttctacaaaagaatttcatgttggcttcgaccagataattttcgatgtgtgcattttttgagaggaggagggagagtgtagcaaggatagggagtgatactctatccttgttgaattggttgggggtggtgggggggattc

SEQ ID NO: 3011 - DNA, 244 bp, Lilium asiatic
agttgatcatgcatgcacgaaggcggagatggagggctctgatgatgtgaaggtacgaggagcagaggatcaagcagaggagatgcacatgcagacggaccggatcgagaaccaggagatcaagcaccgatgattgatggctctgatgaagtgaagttctgatcagacggcgaagagtgaggccgtgcatgaagactctagaagcttgtgtgagaggagatcaccattggttgtgcatgcatgt

SEQ ID NO: 3012 - DNA, 325 bp, Lilium asiatic
gaccttggatcagtattacagccgagacgccacccactgagccattgagcttccccgtgaactgtcatgaataagttgatgggggtatttagatctttttgcggctcaataggcagcagttggttcttttgctgccaaaatatttgagttggagttgtctttggatcttgtatcatcaatttgtttcatactcggtagtataagaaacggcaactatgtgttaaatgtaagtctatatctgaacttgtattttttattgtggattggtttgtttggtttagaataagatgatggtggtgattttggacagtaatggttataggat

SEQ ID NO: 3013 - DNA, 279 bp, Lilium asiatic
atgcataccttggatcagtattacagccgatacgttacccactgagcccttgagcttccccgtggactgtcatgaataactcgatcgggctatccagatcttgatccggctcaataggcagcatttggttctttcgctgacaaaatatttgagttgtcgtagcctttggatcttggatcatcaattagtctcatactccgtagtataagaaacgacaactatttgttaaatgtcaatctatatctgaacttgtatattttattggggattgatttgctt

SEQ ID NO: 3014 - DNA, 236 bp, Lilium asiatic
cttgaaaagtgtcaaacttatctctaaaccctgacatggtcaacattatagggcttacggcggatcctgcgctgtcctgaagactctatatgcaggaactggtcgaataccggatctcctacagacccgtcatgcaactggtggcacgattattgaaggcctagtaactctatcaaaggcacatagcatgaggagggatgtgagcggtgaaattcttttacaaaagaatttcatgt

SEQ ID NO: 3015 - DNA, 133 bp, Lilium asiatic
cccacgcgtccgagggattggacgtcttttaggaacgcgaataagacgtttgatgtcagggcataccatactgatactacggtggcctgcaccgtccaaaacgaggtcgttgcttacaaagacctgtccatat

SEQ ID NO: 3016 - DNA, 393 bp, Lilium asiatic
gatctggtaaatgagatcagacgccaaagatgttcgtacctacgtttccggttgtgtagaaggggtgatccgtcaggcatgcttttctattcatacatggttgaagacaaggcacccggtggactttcgtatgttgagttccttgtacatatacatcgacaaatacaaactaaaatggcgtgagtgtcctgcatggtccgacaccatatttttgtgagattcggttagtggagcagcatcgagtttggagttccagcaagtaacttatttactgatagagagattttaccgagtgttgttgctattattgtccagactgttgagtagatgagaagtgaattggtattaacggcttgactttaccgattggaataattataaaatggtgtttcc

SEQ ID NO: 3017 - DNA, 335 bp, Lilium asiatic
cgaaactttaggttgctggaggaactggaacgtggagagaagggcattggagatggttcggttagctatggaatggatgatggagatgatgttctcatgcgttcttggatgggaaccatcattggtccacacaacactgtgcatcaaggacgaatctatcagctgaagctattttgcgacaaagattacccggagaagcctccaagcgttcgtttccactcccgaatcaacatgacatgcgtgaaccatgacactggagtggttgacccgaagaagttcgctatgttggcaaatgggcagcgagactacaccatggaatacatactcactcaact

SEQ ID NO: 3018 - DNA, 452 bp, Lilium asiatic
  modified_base (414)..(414): a, c, g, t, unknown, or other
ctagatcagcagttacacggcggactagggcggcggacacagagccgaaagactcaccggggtcgcccgccgaccgcctctcgccgaccgccgccgtcgcgttcgccgagatttctgcgtcctctgctatggattacaacaacaagcacatcctcgcccccatggttcgagtgggtactctgccattcaggatgctggctgccgagtatggtgcagacataacatacggggaggagataatagatcataaatttgtgaaatgtgagcgacacacaaatgagtttcttgggactactgattttgtggaaagagggacgggcactgttgatttcagaacttgttctgaggaaaaaaatagggttgtatttcaaatcggaacttcagatgctataagggctcttactgctgctcagntggtgtgcaaagatgtagctgctatagatataaacatg

SEQ ID NO: 3019 - DNA, 185 bp, Lilium asiatic
ctaagacaccaatgtctctctacactgcgcttgtgctcactactccatcagagtatttaagtgtgctttccaaaagggtgagaggctcattgtcctcgtcatgtctccaaagcaccccaggatcggacctgcacctgctcctccttcagctccatttgaccatctgtctcttgcttcaaccatct

SEQ ID NO: 3020 - DNA, 284 bp, Lilium asiatic
attatctcataaagcttcttctcatcggcttttgcggcgttgttaagagatgtcttctacgacggttttcggatggctctggcaccactcgtatcatcactacaattccatttaattccaagacaaggacaaccgaactagattctaaacgaatcaaactccaaaagacggatactattatggtaaccagatttaccaaccattccactagaccctatatggctgaactcgggctctttctagtctatgatgtcactgaccaaaacatgctcatcaacatacct

SEQ ID NO: 3021 - DNA, 344 bp, Lilium asiatic
attatctcataaagcttctcctcatcggcgatagcggtgttggtaagagttgtcttctactacggttttctgatggctctttcaccacgagtttcatcactacaattggaattgatttcaagataaggacaattgaactagatgctaaacgaatcaaactgcaaatttgggatactgcaggtcaagaaagatttagaaccattacaactgcttactatcgcggggccatgggtatcttgcttgtttatgatgtcactgatgaatcgtcgttcaacaacataaggaattggattaagaatatcgaacaacatgcttcggataatgttaacaagattctggtgggt

SEQ ID NO: 3022 - DNA, 425 bp, Lilium asiatic
ggaacctatctatgttgatcctttaaatttgactgccatggcgtgcccctctttaccactctgtccactggctataaccgaagctgagagagggatacctaaaattcttaagcgggttcgagctgttttcgataaagtgggtatcaagaacgaagagtcggtagttattagggtaaccggctgccccaatggttgcgcgagaccgtatatggctgagctcgggctggttggtgacggccccaacagttaccagatctggcttggggggatgcctaaccagacttcactagcgaagtccttcatgaataaggtgaagatccaagatctagagaaggtcatggagccgctgttctacagctggaacaaaacaagacttcagggtgaatcatttggtagcttcacaaaccggattgggtttgagaaac

SEQ ID NO: 3023 - DNA, 133 bp, Lilium asiatic
aaaaaaaaaaaaaaaaaaaaaaaaaaaaaataaaaaaaaaaaaaaaaaaagaaaaaaaaaaaaaaaaaaaaaaaaaaaaaaaaaaaaaaaaaagaaaaataaataaaaaaaaaaaaacggggaaaagcttaaa

SEQ ID NO: 3024 - DNA, 333 bp, Lilium asiatic
aagtgatcaaaacataactttttcataggatgacactacataggtttgagggtacctcatggagtagcatcaggtttgtgctggcctactatgatgcacaggaccctcttaaaagaggggatcgcgtcaggcatctggctttcggatccggcttaaagagtaacagatctgcataccgctcaatgggctcctttcgtaggcccagtagtaacccatgactcgattgccttgaccgctaacaacgtcccactttaaagagtgaactgataatgaactacactaatgaatattgatgaggacgccacagaaataatttttaaattctatttgtat

SEQ ID NO: 3025 - DNA, 384 bp, Lilium asiatic
accggcctgcccttccagcagtgcgcccaccatatctccaccatcgactgccagctctccggccccgtcggcggcatgatcggcttcgtctccggctccctccaactcgccggcgaacagcacactctcaagttcagtcagatgttccatctgatgccgacgccccagggaagcttctatgtacagaatgacatattccgcttgaactatgcatgaggtgagttataaacagcaggaatgtactagccagctaggacctgatactgcagaattttattggacaaagattcatcttttattgtgttgttgttagatggttgttctaaggatgttaaacttgttatagacttgccctaatgaaccaatggttattttctatgtaaa

SEQ ID NO: 3026 - DNA, 358 bp, Lilium asiatic
ggagaatgaagaagaagctgacatgataaattaaataacagaggatgagaatgctgctgcggccgtgtcaagtgggggtgagcacatcagagattctttctccagcaagtgaagtccgtctgttttttcctcctggtaaaataatgcacatagtgaccctctttcctgatgagatggcatacaaactgtctgtggcctttgatgataatgatgattcagaactcccttcttcaccttccgagcctgaagttgtgatgttcttgacctcaacgtcacttgtctccaaattgaggttgtctcatatgatgatcaatgaccattatattccaatgttctttattaaacattgatctgttgt

SEQ ID NO: 3027 - DNA, 449 bp, Lilium asiatic
cccacgcgtccgggtaggcgatggagtccaggatgtcgacgagggtgacaagagttgctcagccaatttcaagagctcgctgaaaaaactttttgaggacctattgatggagttcactgtcaaaggagccgactgcgatcagttccttgctcagaaagttaaagatggagcctcaaaagcagtagatactcgattgaagctatgagatcaggttccagtactggtgcggctggctttgcctccaattggtatttcgcatttatttatatagattagtccagaatgaactggttggttaaagtgactgcctaaccttatgagtcgtgtaaataggttatgtagataaccttatgctttgacttagcaacttttgctgtgtctatcgacattgtctcattatgttcatagcgcttttctaaacccttttatctaaagtctttcttggtgat

SEQ ID NO: 3028 - DNA, 148 bp, Lilium asiatic
cccacgcgtccgaactgaaatctgctatggaggagcatggaatgggtgatgcagcgactagcaaggaaataatctctgaggttgacacggacaatgatggaaggatcaactatgacgagttttgtgcaatgatgagaggcggagttca

SEQ ID NO: 3029 - DNA, 337 bp, Lilium asiatic
gatcatcagccgatttgagaagaagggattctatctgaaagggctgaagatgcagaacgtggagcgatcgggcgccgagaagcactacgcggatctgtcctcgaagcccttcttcggcgggctggtggagtatattatctctggtccggtggttgcgatggtgtgggagggaaagaatgtcggtgtcactgggcgcaagatcatcggggctaccaacccggcggagtcggctcccgggactattcgtggggatttctcgatcgagattggaaggaatgtcattcatggtagtgattcagtcgatagcgcaaggaaggagaatggtctgtggttccct

SEQ ID NO: 3030 - DNA, 204 bp, Lilium asiatic
gttgtgtaaaagaacttgataactcgacttgctcatgattataaataaataaatatagaccgatcagtattactccttaaaaaaaaaaaaaaaaaaaaaaaaaaaaaaaaaaaaaaaaaaaaaaaaaaaaaaaaaaaaaaaaaaaaaaaaaagaaaaaggcaatagataaacaggattaaagtttacgtaaatgcaaatgaaaa

SEQ ID NO: 3031 - DNA, 412 bp, Lilium asiatic
ggcgacgccggcgaggctcctctctactttcttcagaaaatgacgacttcaaggcgccttgcagacaggaaaacagcaaaattccagaagaacattacaaagagggggtctgttcctgagacaacagctaagaaaggaaatgactatcctgttgggccaatcctgcttggtttcttcgtctttgtggtcattgggtcatctctgtttcagatcatcaagacagccacaagcggggggatggcctgaatacaaatgatagtgagactttcaaggctcttgcagtacgaatttacgttacaatgttaacctgaatattagagatattatgttaagaaacttggttgtgtccgtgtactctttttaccttattgacttggtttgaattgaaataatggggccccctttttgtccc

SEQ ID NO: 3032 - DNA, 381 bp, Lilium asiatic
gctggtttgaggaaagaaagggcagagggaaagtttgtgccagacccgggatttgaggaagtcaagaaatatgttcgtagtggtgtgtttgggagtaactataatgagttactcggatctctggaaggcaacaaaggatttggtcgtgcagattattttcttgttggcaaggactttcccagctatattgaatgtcaagagaaggttgatgaagcctacaaagatcagaagacatggacgcggatgtcgatcttgaatacagctggttcctacaaattcagcagtgacaggactatacatgaatatgcaaaagacatctggaacatcgagcctgttcagttgccctaaagaatctggtcttacttggtcatggtatcgaaa

SEQ ID NO: 3033 - DNA, 295 bp, Lilium asiatic
ggcttgcatgctgatgccctctacatatcttatactcaagtttttcatgctcataaacaaatgcaccttaccgagtcagcctcaggtgccttaagaccttataagttctaaacttgccacattgagctaatcttgtcttaaaaagaatagcccttcaagaaagagcctgaaacccatattgcccatatgaagcctaagaaagctggagttcttcgtagtggtgctttatcttaaaccattttaaatctttctgaatgaaaaacttttttgcccttttaaacaatttcaaatattt

SEQ ID NO: 3034 - DNA, 288 bp, Lilium asiatic
cggacgcgtggctaaggttgtgggcactcttgccttctctggggcgaagaaggggagggggcggccttcgaaggctaaggccgcggctgaagatgtggctgtttgatgagctccttgtatgtctgggaagtgcattgctatgggtcccttagttctgggtgtgagagtttacgtctgctggtcttgattagtggtagcattgaccttctttggcttgtgttgtaacctgcacatgtacattgtgcaagttgcagcataaaaatgttatgaaaattttcttattctgtt

SEQ ID NO: 3035 - DNA, 391 bp, Lilium asiatic
tcgcagccagcaaagttttggggaatagatctgtatgcataggttggataacctgcaggcatggagtctcggataagcggtgaaaaaaggctagctaccttctaccctagagaataggcccgttgatgtttaattcttcgaactctttttgttttgacttggtggttttaagtcgggaatctctctatctttactcttgctatttctattcgcactggaaatattatggcaatgggatttgagtcaagattgtcgtgtgtatgtgtgtatgtgagagggtgtcgaagttgtgtgttttagaggagattgttagagtgttgcaccatgtctgacactcatgttcctctaataaaataaatcagattttaatggaaaaaaattaaaaataaag

SEQ ID NO: 3036 - DNA, 396 bp, Lilium asiatic
gaaaggcttggatgttgatgccctctacatatctcatattcaagtgaatcaggctcagaagcaaaggcgccggacatatcgtgcccatgggcggatcaacccttatatgtcctcgccttgccacattgagctaatcttgtctgagaaggaagagccagtcaagaaagagcctgaaacccagattgcccagaggaagcctaagaaagctggagttctccgtagtggtgcttcatcttaaaccatttcaaatctttctgattgtagaactctgttgcaggtttaaacaatttcaaatatttttatttgagcagacttcttttggcggtttgggggggaatttggttaaaccattatttaaccttcgaatgggaaccatggcaattaatttgctaggtt

SEQ ID NO: 3037 - DNA, 401 bp, Lilium asiatic
tcgtaaacgactcctcaatcatgtcatgacgcttctagggagggaaggggctcggcaagggcggggccaatcgtcaccgcaaggtgctgcgggacaacatccagggcatcaccaagccggccatccgccgcctggctcgccggtgctgagtgaagaggatcagcggcctcatctacgaggagaccagaggggtgctcaagatctttctggagaatgtcatccgcgatgctgtcacttacacagagcatgctatgaggaagacggttacagcgatggatgtcgtctatgctctcaagcgttagggccgcaccctctatggattctggggttgatcttttcctggtcatctgaggctctgattgcttttgaatttggattggagttttgggtaatgagtgtct

SEQ ID NO: 3038 - DNA, 442 bp, Lilium asiatic
gaattatttatacctttgtggccacagctctctcagggtagactatacaaattctttcaatgaacctggtttgttaaggaaaatgaatgaaggtggatgttaatgtttatgctacttttacacacaattcataagagggttctaaaaagttaaaatttctcacttagaaatatagactttggataagtgtctttatttgtacttgttcaggtttgtggttgaagagaaaggtatgtaacccaaagtgcatcttgttacaacactccatcctttacctgctcaacactatatgtaaaggtatgtaatctactactcagtccaccaaagtatgcccttgattagctggacgttgaacatattaaataaattttttattgatttattttatttttttttttaattttatttatttatttttttttatttttatttattttttatt

SEQ ID NO: 3039 - DNA, 373 bp, Lilium asiatic
gtttgttgcctcgaactccaaggatgaccctgccaaggaggcggccaacttcacttcccaggttatcatcatgaaccaccctggccagatcggtaatggttatgctcctgtcctggattgccacacctcccacattgctgtcaagtttgctgagatcctgaccaagatcgacagacgctctggtaaggaaattgagaaggagcccaagtttttgaagaatggtgatgctggattcgtgaagatgattccgaccaagcctatggtggtggagactttctccgagtatcctccgcttgggcgttttgctgttagggacatgcgccagactgttgctgttggggttattaagagtgttgagaagaatgatcccact

SEQ ID NO: 3040 - DNA, 58 bp, Lilium asiatic
attcaactcatagagtgctgaagagatggaatctggaaagattggcaagggtgctgcc

SEQ ID NO: 3041 - DNA, 224 bp, Lilium asiatic
cggacgcgtgggcctgagaagaagcagaggataggcgatgtcgatttgccgaagtctctgcggcgatttggtcggaagaagatatcatgaattgcagaccgagttaattttgttagcatttgttgcagactgagttaattttgtagcaagatgaaaccttagtatttattttcgaagctggaaatatttatttacaaatacaatttcagtagaaatttatgata

SEQ ID NO: 3042 - DNA, 244 bp, Lilium asiatic
tccgggtttagccaagccttctgagacgctctacatatattatattcaagtgtttcacgatgacaatcagactcaccctatggggcgatttgatgggcagatcagctcttatatttcctacccatgtaatattgagctcatcttgtgtgaaatggactaaccttttaagaagaagcctccttcccatatatttcagaagcaggctaaattaactgtcgaattccatattagtgcttcatctatg

SEQ ID NO: 3043 - DNA, 266 bp, Lilium asiatic
tcgattcggagcaaatcagcgatgtcgcgtcaattcaacggcggcaaggggctgggcaaggtcggagccaatcgcggccgtaaggtgctacgggacaacatccaaggcattaccaagccggcgatccgccgactcactcgacgcggtggcatgaagaggatcagcggtctcatctacgatgagacccatggcgtgctcaagatctttctgaagaatgtcatacgagatgctgacacctacaccgagcatgctcggcggaagacggt

SEQ ID NO: 3044 - DNA, 308 bp, Lilium asiatic
gtcattttcaaaccagggaccaagggcagtgtccatcctctcagcaaccggtgcagtttcagacagtgaccttgcttcagcctgctgtttctggtggtaccatcacttatgagggccggtttgatattcttagcttgtatggctcttatatgctgaccgatgacggtgaatcccgtagccgaaacggtggcctaagcatcgtcctatccagccctgatggccgtgttgtccgtggtagcataggagggcaactcatcgcagcaaccacagttcagttggtagtcggtagcttcatatatggcagatcg

SEQ ID NO: 3045 - DNA, 421 bp, Lilium asiatic
agtttgctgagatcctgaccaagatcgacaggcgctctggtaaggaaatcgagaaggagggcaagtttttgaagaatggtgatgctggatttgtgaagatgattccgaccaagcctatggtggtggagactttctctgagtatcctccgcttgggcgttttgctgttagggacatgcgccagactgttgctgttggggttattaagagtgttgagaagaaggatcccactggtgccaaggtgaccaaggctgctatcaagaagaagtgaggtgttcttcaatttatgtctgagtttcttaagatctgcaagagtctagttggtaatgcttggttttgtttatcgaactttcgtgttgttaggtcagtggttttgatcaaactatttgctttgctgctctatttggtcttttggtatgacta

SEQ ID NO: 3046 - DNA, 233 bp, Lilium asiatic
cccatgcatgcattcctgcaataattgaatattttctggcacaatatcgtgcactgtgacatgatacgtagaccgcctgctagacctcctgaaattaatcctcatattaatgaacctgatgatgattataacattgtagataacttaaatgctcttggaaactttaatgtcgatgttcagtttgacgtacagatatacaagacgtgacatcataaacaacttctagatctaca

SEQ ID NO: 3047 - DNA, 415 bp, Lilium asiatic
acccacgcgtccgcccacgcgtccgcttcttccctcttctcgattccaaatcaccacgcatagaccctagcatcggtctgttctcaatccgccgccgcagagccacctcaattggcgacgcactctcaacccgccgcctcaattgacgacgaacccctctccagggtttatattttccgtgccaaggagagattcaagggacaagatgctctcttccttgctaaagttagttgggcctaaaaatgtcccaaagatgttcaggcagctagagcaagagatggaggctgtgatcaatgtattgcaaccagggcctctgggtataatcgagcacaagttctccgctgaggaggtgcagaaggccaagatcacggtacaaagagcagttgaaaattggctaacgagtgctgccattgag

SEQ ID NO: 3048 - DNA, 72 bp, Lilium asiatic
aaaaaaaaaaaaataaaacaaaaaaaataaaattaaaaaaaaaaaaaaaaaaaaaaaggaaaaggtaaaaaa

SEQ ID NO: 3049 - DNA, 431 bp, Lilium asiatic
ctaacctggtgcatgcacagagcatcctcgcaatctgtgccgtgcaggtggtgctgatggggttcatggagggttacagaattggcggcgggccactaggggagggactcgacccgttgtacccgggtggagcgttcgaccccctagggctggctgatgaccccgatgcatttgcagagttgaaggttaaggagctcaagaacgggaggttggctatgttttctatgtttgggttcttcgtgcaggccattgtgaccggtaaggggccggtggagaatttgtacgaccaccttgcggatccggcgaccaacaatgcgtgggcttatgcaaccaacttcgttcccggcaagtgagggtttcatgttcatgtatggatgtatgtgttggtactttgatttgggtttgtgaatttgaaattgttatgaaggaac

SEQ ID NO: 3050 - DNA, 428 bp, Lilium asiatic
aggaaatctacccaaggattcgaagaatgggaagagacggagctcatttggtacggcagagactgactatgttgaccatgaacccaaaaccagtgggagcagcaccgtaccaagttacatgcaagctacagagtctgccagggctaaggcccatgctggtatttctcccaaactgagcccagacgtgcatgacaaagacatttaccagaagaagagacattctttacctattgctaatgggaagcagggatcatccccccgcatgcagaggtcaccatcacaagtacaccaggttccaaacgtcaatggaaatcattctcctaataattctgctgagaaaagatggcaaagatgaaggagccaaccggtagctgattgatgcatgagtttacttgttcgtgtctactttttgtgtgaggttgattgtt

SEQ ID NO: 3051 - DNA, 333 bp, Lilium asiatic
atttccccccaatttaattttattatctccagtgacatgaacaatgttttgttgttggtaaatttgtgatatgaactatctacttatagtttgtacatatttaatgatatgtaaattgggggaattgtgttgaaaaaaacaaaaaaaacacaaaaaacaaataaaaaaaaaacataaaaaaagacaataaaaacaataaaaaaaataaaaaaaaaaaaaaataccttgaaaaagaaaataaaatacataaaaagggggggcctttttaaaggacccaatttttcgtaccgggaattgggattttatggattttttatagggacccctaaattc

SEQ ID NO: 3052 - DNA, 395 bp, Lilium asiatic
gccattgattggactgaaccatggctaatatgcttgatagcgttccatgtgactctgttgacaacaactatcatctcaaggaaaaatgccacctttcagttttgcctatccattctggcctttggtggtgtaattctctctgagaggataaacatccttctcatggaacactggaagagctttgcaggccagaactactttgattcaagtggccttttcgtctcagtactgtgggctggtccacttctcatcacagctatggcgattgtggtcaatactctgatcacactgtgccaattgatgatcaaatggaaaagagcagaactcatgcaccgggctagactttctagtcgtaagcaggattagtatcgatggagatatgttttatcataatt

SEQ ID NO: 3053 - DNA, 152 bp, Lilium asiatic
ctagcattagtacatatcaagcatgattgctaagagcatgggtttgagtaactggtccatggattactgtccttgccagttcaggttaaacaaatacagcttcacagaatcaacattggtctcctctggtgtctcaaacctacacatacttt

SEQ ID NO: 3054 - DNA, 444 bp, Lilium asiatic
  modified_base (260)..(260): a, c, g, t, unknown, or other
  modified_base (270)..(270): a, c, g, t, unknown, or other
  modified_base (310)..(310): a, c, g, t, unknown, or other
  modified_base (337)..(337): a, c, g, t, unknown, or other
cgacaaagagaaaatactatgaaagtgttgttgctttgatgtcagatcaggaagatggcgagcttgatatcgaccaattgaaaatacttacttccaaagaatcaaaaacagagaacacccagtatttcctaattacctggccagataaaaaggcacatcagattacaaacttcccccacccatatcctcaactggcatccttacagaaagagatgatcatataccagcgaaaggatggtcgtcaactgactgcaactctntatttacctncgggttacagcccagcaaaagatggacctctcccatgtcntttctggtcttatcctggagagttcanaagtaaagatgctgctgggcaagtccgcggctctcctaatgagtttgcaggcatttatccgacatcacctcttctttggttggctaggggatattctggtttatatg

SEQ ID NO: 3055 - DNA, 407 bp, Lilium asiatic
atccgatcctcctcgtctgcagcgattattaggttcttctctgcagatctcggattcaggacctcgaatcccacccctagctcggctccagctcggaagcatgggcatcctcttctctcggatgctctcttccctcttcggcaaccgcgaggctcggatccttgtcctcggcctcgacaacgccgggaaaaccacaatcctctatcggcttcagatgggggaagtagtgtcaacaattccaacgatcgggttcaatgtggagacagtgcagtacaacaacattaagtttcaagtctgggatctgggtggacagacgagtatcaggccatattggagatgctactttccaaacacacaagccattatttatgttgttgattcaagtgacaccgatagactggtaactg

SEQ ID NO: 3056 - DNA, 223 bp, Lilium asiatic
gtgagctctggttcaaaatttgtgctggttcttgccctcgttgccgcattcactgttgagcttgaaggaagagtgtatcagcctcagagtttgccggtcgtcggtgatgggctcccggctctaggcggccttcctgctgtaggaggagggctgccggctgtaagcggagggctcccagctgtaggcggtcttcctgctgtacgagggctccctgctgttggtg

SEQ ID NO: 3057 - DNA, 354 bp, Lilium asiatic
ctagcagtagacatatcaagcatgattgccaagagcatgggtttgagtaactgcgccttcgatgactggccttgccagttcaggttaaacaaatacagcttcacagaagcaacagtgggctcctctggtgtccaaacccatacatactctgggttccttatcgtgctccaagaagatgaatctgggggcggtctggaggtgatggacaggacaggcatatttttatcgaacaatccatttccaggctcattccttgtcaatcttgttgatgcttgacaggcatggagcaacgggaggctgctcaatgtgaagcacatggtgcattgcaaggcatcagcagtacgggtttcgatc

SEQ ID NO: 3058 - DNA, 424 bp, Lilium asiatic
gaaggatagaaaccccaagtaccccagaatcagtgcccctccaaggaacaagctagatcactaccagatcctcaagtatccactgaccactgagtctgccatgaaaaagattgaagacaacaacactcttgttttcattgttgacatccgagctgacaagaagaagattaaagctgctgtgaagaagatgtatgatattcagacaaaaaaagtgaacaccctgatcaggcctgatggaacaaagaaggcttatgtccgactgactccagattatgatgccctggatattgcaaacaagattggtattatctaaggctttatgcgagtcctgtttttgtcttgatgtatgtctttaagatgttaaacattgttgttgcaaactttgtttggattgtcatctttaatgcctaaacaaggatatttt

SEQ ID NO: 3059 - DNA, 389 bp, Lilium asiatic
  modified_base (7)..(7): a, c, g, t, unknown, or other
  modified_base (22)..(22): a, c, g, t, unknown, or other
gaccgantcgttccgtacgcanagttgaatgagggttataagatgttaatcctgttagcaacagtagagcaagttaccctgtatggcgttctctcctatgatctccaagctcttagtagtgttgattgcttgtgtagttctgcatgcttgatagattaatgacccactttgacgaggtattttctaggggctcatacactttgtattattgagtgaaaggagactgcaacaatatctggttgattactgaagcctgtattagagtaagatctcgatactttattcttcaggcttcacatttctgatggtggtgaggacggcatttcctacactgtaatatttgccattatgaaactgaagagtaatggttgccaatgtcagtttatttc

SEQ ID NO: 3060 - DNA, 392 bp, Lilium asiatic
ccttctcccaaatccccatcgcaatggccggaagaggaaaggcagtcggcgccaccggcgccgcgaagaagtcgtcgtcgaggagcagcaaggccggtctccagttccccgtcggcaggatcgcccgcttcctcaaggccggtaagtacgccgagcgcgtcggcgcaggcgcccccgtctaccttgccgccgtcctcgagtacctcgccgccgaggttttggagctggctggaaatgcggctcgggataacaagaagtctcggatcgtgccgaggcacatccagctggcggtgaggaacgatgaagagctgacgaagttgctgggagccgtgaccatcgccaatggaggtgtgatgccgaacattcacaacagtcttcttcccaagaagtct

SEQ ID NO: 3061 - DNA, 312 bp, Lilium asiatic
ccacgcgtccggaacaaccaactatcttctctcctcttctcaagaaagaaatagagacgatcatgagatcgtggtggagatgataagaacctgggatctttgggagctggagaaagatggttggaagggaaatcataacagaggagtagtgtgtggaggatttttatataggattcaaagatttggtgtggaagaaatagctgcttattcatgatcgagcaatattgtagctctcataatgagttccccttactttaatctttactatattatgaattttctttattatgaattttatttatgatgaatatt

SEQ ID NO: 3062 - DNA, 362 bp, Lilium asiatic
ttccgattcaaatgtcgccgttggtgctatgtcaacgggcgaattaactccagatatgcaagaatgaagatggtgattaagcaacgaagtaggcatcattgtcactacattctcctgggcacctggtgtagatgtttcagcatcaactattggtggaagattcgtcatcgtctattgctgatgaaatggggtctcttgacattagcctgcccattgttagagtttagcttggagtaacatgtttgcctaatgttattgtctctgattgctctttttgtgtatatttctagtgatacttttgatggaggaatgcctttatatagtgatcttcttgttttcaaatagaaaccgccgactcttta

SEQ ID NO: 3063 - DNA, 385 bp, Lilium asiatic
gcgagttgctttaatgaaagtcagatgcaatgcaaccctgcagaaatgaatgaaaatgcgccatcttatgatcaaggtaattattcagagttttacacggtatcttctgagatggaaactgatgtggtgcaaaataagctccctctatcccgtgctagaatttacaggggtaagaaatctttcatcaaagctccgaggaagttgactacctcagttgtctatccttttgctctcatcaaaccatgtggcgctcaaagggatgtgaccttgaaggacataaatcagcggattcttgcaccaccttccttaaaagaaaaacccaaagaagaagagtccctctcttaccccaaatctgctttttctgggaaacctgtttgtgtcaaaa

SEQ ID NO: 3064 - DNA, 344 bp, Lilium asiatic
aaggaattgtacctgggggtggtgccgcctatgttcatctttcgacctatgtggcagccatcaaggatagtatggatgatgcagatgagcggctaggtgctgacattatacaaaaggcgttgttggcacctgcggctttgatagcgaacaatgctggagttgagggagaagtggtggtggataagatcaaggatggggagtgggagtttggttactatgcgatgactgatacgtatgagaatctggtggatgctggggttatcgacccggccaaggtgacaaggtgtgcactgcagaatgctgcatcggtggcggggatgattttgacgacacaggctattgtg

SEQ ID NO: 3065 - DNA, 122 bp, Lilium asiatic
aaggcattgtacctgtcggtcatgcctgctatgagcatgtgtcgacctatcgggcagccgtaaaacatagcatggatgatgcagataagcagttacgtgctgacattatacacaaggcgttg

SEQ ID NO: 3066 - DNA, 246 bp, Lilium asiatic
  modified_base (202)..(202): a, c, g, t, unknown, or other
gcgtacaaactcaagctaagatcattgcccttcttgctaaagcttccacgcttagggccacgggcagacatcgtgacaacaatactactgcactgctcaaggcagactcatgttcagattaaggctgatgtcaatgcatgtgacacgactatcatctctgacatctattacactgagttcgataactttttcaagtggttcngtgcctcccagtgagccctattggtcagttatattagctgttat

SEQ ID NO: 3067 - DNA, 357 bp, Lilium asiatic
gcgcggacacatgcgcttagtactacctatggtatgagcctgtgaacctagatcagggtgaaggaattcccagcatgtctcgtgagatacagacttatgcacctgacgcccgtgttttgactacttattattgtgctcctaataattcacatattacacaaagaactatagaagcctttgatcaggtatccaacctcttgcttcctcacacccagatattctgtacaagtgatttgctatttgatactttacaggacttgttgaatgatgttgtctttgagttacaaccacagaatgatgatgtatgttggacttatgtatgtatgggaccatcatatcctcatccgaactggcatc

SEQ ID NO: 3068 - DNA, 398 bp, Lilium asiatic
cctaaacctaacccctccaatggcccgcaccaagcagactgcccgcaagtccacaggcggcaaggctccccggaagcaacttgcaaccaaggcggcacgcaagtctgctccggccaccggcggcgtgaagaagccccaccgcttccgccccggcactgtggctctccgtgagatccgcaagtaccagaagagcaccgagcttctcatccgcaagctccccttccagcgcctcgttcgggagatcgcccaagacttcaaggccgacctccgcttccagagctcggcggtgtcggctctgcaggaggcgtcagaggcgtacctggtggggttgtttgaggacaccaacctgtgcgccattcacgcaaagagggtgactatcatgccaaaggatatccagc

SEQ ID NO: 3069 - DNA, 367 bp, Lilium asiatic
gaacccgtatgcgaagacagcgaggaggatggcgctgctggcggaggctcagagggtgaaggctaagaaggagaagttagacaagaagaggactccactttccaaggaggaatctgataagattaaggctgctgggaaggcatggtacaagactatgatctctgacagcgattacactgagttcgataacttctcaaagtggcttggtgcctcccagtgagcactattgggcagttagattggctgttatcagttttaagttaatttttctgcgttttgcatttggttattttggttcctctatcttgagtcttgtctccaaagtttttatccgtgaacaaatttctgaaggtttatgttgagttgt

SEQ ID NO: 3070 - DNA, 374 bp, Lilium asiatic
cccacgcgtccgctcacaaaaaccccattctctgcgccctgagcaatcggcgatgtaggccgatctcgtcgaaatcgggtccaagcgatccatcaaggatcgcctctacggcaacctcgacgacgacgacttcgcccggagccgccccttcagcagcaagaggctgcgccaaagtgaagacacatggaagcatgatctgtacgaggatcgagaaaggccgaacatttcaaccagagtcggtgctggagatcttcgattgaagcttctaaagaaaactagacagcaaggttatcaaggtggaaaaggatcaggtgttcgggatcttcgtgaaaagctatctggtacaatgcaaccaccaccggcagttactgttc

SEQ ID NO: 3071 - DNA, 413 bp, Lilium asiatic
gagaaccacaccatttactcttgtggtcacctttccatacggtgccacacaagcagaggctaaggggaagttgtttgtcgacgatgatgaacggcctgagatgaagctcgtggatggagaatcgtcgtacgtcgagttctatgctgctgttagtgggaatgcggtgaaggtgtggtctgcagttgaggcaggggaatttagtttgcagaagagattgttgattgagaaggtggttgtgttggggttgggtggtaagggctcggggcttaagatggatgttgatggggagcctgtctcagatttaacaagtgttaacttcagtgagccttcgtcagtggatttggaaaagctggaaggtggttcatagaagagcagcttaatggttgagatcggtgggttgaatttactttttg

SEQ ID NO: 3072 - DNA, 357 bp, Lilium asiatic
accaagccggcgatcaggcggctggcacggcgtggcggcgtgaagaggatcagcgggctcatttatgaagagaccagaggagtgctgaagatatttttggagaatgtgatccgtgatgctgtcacctacacagagcacgcacgtcggaagacagtgacggctatggatgttgtgtatgctctcaagcgacagggccggactctgtacgggttcggaggctgatcttcttctctggtatcctagtcttggaggtgctgttattgttagctgtgaatgttgttttctgctgtaagcttttgttagatcaccttctggtgtgaactgcacttaacttttagttggatgattaattcttct

SEQ ID NO: 3073 - DNA, 388 bp, Lilium asiatic
ggagaagcagcaaacccttaaagggttgagctcaaatctggcccccaacctccacggcaacctcaaaagcgccgccggcgacgagcaattcaaggagatcctgcagagcatcaggaccaccaaaacccccgcggttatcaacttcggtgcttcatggtgtcgtgtttgtagccagatcctacccgccttctaccagttaagcaatggattcccaaacctctcgtttgtctatgtcgacatcgatgaatgtcctgaaacgactcagcacatccgttacaccccaacctttcaattttatcgtgatggagagagggtcgatgagatgctcggtgcaggagaggagaggctgcgtgatcgcttgtggttgcattcctgaggactggcgatg

SEQ ID NO: 3074 - DNA, 446 bp, Lilium asiatic
cggacgcgtgggcgaggaaacacctaaaatagcttggtatattggtccaacagtcctgggatctttcttggtatttccatcactttacctacgaagaatcctctctgcagtatttgaggattcccttttaacagattttctcatattgttctttactgaagctcttttctatattggagttgcaatctttgttctggtagtaaatcatgttcggagacccctgaagcatacagcagtcaagaattctgattcctcaaaatctcagttaggacttcgtgtgtcttctgttgcaaccttggtactgagtgtgattatacctctagtaactatgggcatggtttggccctggactgggccagcagcttctgctactcttgcaccatatctggtgggacttgtcgtacagttcgcgtttgagcagtatgcacgtgttcagaactcacctg

SEQ ID NO: 3075 - DNA, 372 bp, Lilium asiatic
gacccactcgtccgacacaagcagcaaacccttaaagggttgagctcaaatgtggcccccaacctccacggcaagggtcaaaggcgccgccggagacgagcaattcaaggagatcctgcagagcattaggaccaccaaaaccctcgcggttatcaactttggttcttcatggtgtcttgtgtgtagccagatcctacccgccttctaccacttaagtcatggattcccaaacctctcgtttgtctatgtcgacatcgatgaatgtcctgaaactacttagcacattcgttacaccccaacctttcaattttatcgtgaaagacagagggtcgatgagatgctcggtgcaggagaggatatgctgcgtgatcg

SEQ ID NO: 3076 - DNA, 445 bp, Lilium asiatic
taaaaaaaaaaaaaaaaaaaatataaaaaaaaaaatttaaaaaaaaaaaaaaaaaaaaaaagaataggaaaaataaaaaattaaaaaataaaaaaaaataaattaataaatataatttaaaataataaaaaaaaaatatttattattaatttaattttaaatataaataattataataattattatttatatataataataattttttttttttttttttcttttttttttttttatttttttttttaatttattttttttttattttttttttatattatttttttttttcttttatttttaataatttttttatttatatattttttttttaattattttttttatttatttatatttttatttttttttttaatttttttttttttaatttaattttttttttttttatatttttttttatttattttttataatttttttt

SEQ ID NO: 3077 - DNA, 379 bp, Lilium asiatic
  modified_base (325)..(325): a, c, g, t, unknown, or other
cggacgcgtgggggccaagaaaccgagcggatacccgatctcgatccccgtcgccgtcggagtacctccgccgccggctgctccggattcaccgccgctcccgacatcatctgccgcctgatcagtaatggcatcgccttctgattcatggctgagggagttcaatgaagcttccaggctcgttgatgatataacttccatgatgtctgaaaggggttctttgccatctggcccagaagccatacgtcatacatctgcaattcggaggaagataacaattcttgggacaagactagatagcttgcactcccttctgacgaatctncgcaacaagcaaccaatgtcagaaaaggaggtttataagcggcaggacatgatc

SEQ ID NO: 3078 - DNA, 392 bp, Lilium asiatic
cggacgcgtgggttcagtatggtcagaacaaagggaagttgtacaatgaagaatgtgatcgttttatgttatgtatggttcacaaacttggttatggcaactgggatgaactgaaagctgctttccgcacttcacccttgtttcgctttgactggtttgtgaagttccggacaactcaagaattggcgaggagatgtgatacccttatcaggctggtggagaaagaaaatcaagaatttgatgagcgtgaactgcaagctcggaaggataaaaaacttgctaagaatctgactccaacaaagcgctccatagcatagacatcagcaccggaaagccctgcaccaacttctttcaagaagcggaagcaatcctctatggatgactttgtgagc

SEQ ID NO: 3079 - DNA, 158 bp, Lilium asiatic
gaacgaccgacccgacccacgcgtcctaagtaaccacacaaaccgaaccgataccctttctgcatccccgtcgccgtcggggtacctgggacaacggatgtgccagattcacctaaatatcccgacatcatctgccgcctgatcagaaatggcatcgc

SEQ ID NO: 3080 - DNA, 360 bp, Lilium asiatic
gcgaccacgcgtccgcccacgcgtccgacatgaagcggtatgtcaagcagttgacgcctaaacgggatggggagcatcaggtgctatttaagaagcacattgagggggccattaagtttctgcttccgaagcttaatgatctgcaattttttgtggatgagagcatgcaggatgacagtagcctggtgtttgcttattacaaggaaggtgctactgatccaacctttttgtacttagcgtacggattgaaggatatcaagtgctagacttgagaattggcagcatattggaaaaatagtttagtttactagtttgcttgttgtgctctatggatgttgtaatattatgcttggtttttat

SEQ ID NO: 3081 - DNA, 432 bp, Lilium asiatic
cccacgcgtccgcccacgcgtccgacatgaagcggtatgtcaagcagttgacgcctaaacttgatgccgagcagcaggtgctatttaagaagcacattgagggggccattaagtttctgcttccgaagcttagtgatctgcaattttttgtgggtgagagcatgcaggatgacagtagcctggtgtttgcttattacaaggaaggtgctactgatccaacctttttgtacttcgcgtacggattgaaggagatcaagtgctagacttgaaaaatggcagcatattggaaaaatagtttagtttactagtttgcttgttgtgctctatggatgttgtgatattatgcttgggttttatccgttactgtgtactgggtcaataagacttttttgtactgctgagattaagtttaattattatgtggtttatgcg

SEQ ID NO: 3082 - DNA, 235 bp, Lilium asiatic
ccttggtgcatattcacgcaagcaccgtatgatattaaacagacaatggactaactggatttgattgagaagaaacagaaatgattatctgtaatttatatcttgtgctacgttttagtttgacttgttggtttctgtactgcaaaatagtatcatggaacaaattgttgtgaatgaatcggaaaacatgaatcttttataagttaattgtcaattcgtgacccaagccataatt

SEQ ID NO: 3083 - DNA, 340 bp, Lilium asiatic
gttccggaacggtatccctctctccaccgccgtcaccgccaacttcacccgaggggagctcggcaccgccctgaggaagaatccttactcagttaatattctcttggcggggtatgataaggatattggaccgtccctgtactacatcgactacattgcaacttgtcacaagatcgagaaaggcgcatttggttacggatcctacttctccttgtcgatgatggatcgtcattatcacaacaaaatgtctgttgaggaagcaattgacttggtcgacaaatgcattgtggaaatccgaaccaggctagttgttgctccaccaaactttgtcatcaagatt

SEQ ID NO: 3084 - DNA, 268 bp, Lilium asiatic
tggacacataaaccctgcagtgaccttcgggttgttcctggcgaggaagctgtcactcaggagggctgtgttctatatggtgatgcagtgtcttggagccatatgtggagctggtgtggtgaaggggtatcagaaggccctctatgaggggaatggtggaggtgccaatgtcgtcaaccatggctataccaagggggatgggttgggagctgagattgcggggacctttgtgcttgtctacactgtcttctatgctactgatgcctag

SEQ ID NO: 3085 - DNA, 315 bp, Lilium asiatic
caggaaaccgatgtcggtgttaaagttgatgataagattggaatgccggagaagcatgctgaacagggagatgttccgacagcggaggtcaaggaggggcaagccaaggaggtagaggagaaagaagaggacaaggagatgactttggaagagtatgagaaagtaagggggaaaagcgaaaagcactacttgagatgaagactaaagagaggaaggtggattttgataaggactttgaatctatgcaacaactttcactgaagaaagcaaatgctgatgaagttttcatcaaatggggttctgacagggatgggg

SEQ ID NO: 3086 - DNA, 314 bp, Lilium asiatic
ctcatccgatggggttgagccaatcaaaggaccggctgctgtaccagcaggtgctctacggcaacgtcgaggggattaagtccctccgtcgcgacggcgccggcatcgagtggattgacaaagaagggaagacccccttgattctcgcgtgtatgaggcctgaattggtagactgtgtgaaagttatgatcgatcatgggcctaatgtcaatgcctaattgacctggccttaagcttgaacttcattgcaccattgctgtaaaagatgctttggtcaaacagttgaactattactttcttattgaggtgttctt

SEQ ID NO: 3087 - DNA, 434 bp, Lilium asiatic
cgccaaatgagtttggctgcttttggtaccactgtggagaacttttatatgaccgatgctatcactagagcatcaaagatcatggcgcagtgcagtgcgtcacttctgaagaagtgaagcttcagctgaagcaggaaaatatgtaggagagtattgttggatttccagaatgggatacataattaggctgccataaccttgctgttctcataaatggcagctggaccaagttatttgtttttgtttcgcatcatggatgatgatgaacagcctcagtatgctaagagctgttttggtactatggctgccctttggaatgggttttttcggggtatggtaataacagtgtcttaatcggggacaggaagttccttaatttaagaggcagattatttctaaaaaaaaaaaaaaggggcggcctttctaaaggatcc

SEQ ID NO: 3088 - DNA, 366 bp, Lilium asiatic
gaatgacccactcgtcccactcgtccgctcttactgttgttagccttattactacaaccgaatattatactagcatgagcgatacggaataaattaagatggtaacttctctcatttcatacatattcgaattaacaatattatcttctcaaaagaagtattatatgaatacatagtgtatacgaagatctatgcagataaacttcaataatctatgacaaatatcgagtcattcataaacacaagtgtcttgatagatggtcaattagtcttactctcaccatccattataatgaaataaagtatgaattttctccttgttctgacccatcctaaaattgtcccatttcataaaatttaatcaac

SEQ ID NO: 3089 - DNA, 298 bp, Lilium asiatic
atcaaggaagatctttggcctaatcctttgcggtatttcaacaatgagattgaccaaggggattctgatgaagaagaagacggagagggaaaggccaacggcgaatttgaaagcagtgaagaggacgaggatgaggatggtgatgaggacgaagatgatagttagcttttctgtcatctattttttcggcttctaagtttggtctgcttaatggtccatgtaaaacttgtaactggttggtttggtaaggatctgctgacttttctaagattgttctgcttaatggtccatggaaaac

SEQ ID NO: 3090 - DNA, 361 bp, Lilium asiatic
gtggaatcttcccactataaggctgaaccttggaaggaatttccacttaatccgagagattcagttactctcacggttgagccttccctgacgattgcctctctcaagtcgatgctggaaccctatccctggatccccaaggagaatctcgtgctcttcctgcgaggtgggggtattaatgctcccctctgcgacagctccaccctccaagagtgcggtgtggagaacagggatgtcttatttgcctgcatggagggaagcttcaaggtgaaggtctactgtttttgccccaggatgttaatccgcttctctgttgacagctgctttcaaacccttgagtacatcaaggagaagatctatc

SEQ ID NO: 3091 - DNA, 402 bp, Lilium asiatic
gcgcgaactcgctcctcgcccctccagcaggaaagggaaaacgagcaagagggtgcactttgtgaagaatttgatcagggaggtggctggatttgcgccgtatgagaagaggatcactgagctgcttaaggttggcaaggacaagcgggcgctcaaggtggcgaagagaaagctgggtactcacaagagggctaagaagaagagagaggagatggctaatgtcctcaggaagatgaggtctgctggagtgtccgataagaagaaatgatgaggagagactacttgtggactgctttcatatttcggttagcattatgtttctcttgaactgggaacctagctgtagaactagtttaaattttgtggttttttatgcgttgaaggatcttctttccttgtttg

SEQ ID NO: 3092 - DNA, 144 bp, Lilium asiatic
acggtaaaacaaacctcagattctttctaaaaattgcagaaaccttatatgcaagtgtatatcgtgcaatgagatctacaaagagatggggattgactatttaattgataaagaggactccatggatgaatatgataaagtagc

SEQ ID NO: 3093 - DNA, 420 bp, Lilium asiatic
gcgggagttgctgggcgttctctactatctcatcaatagaggggatcaaccaaatcaccactggcgatctaatatccctgtcggagcaggagctcgtcgactgcgacacctcctacaaccagggctgcaatggcggcctcatggattatgctttcgagttcatcgtcaacaacggcgggatcgattctgaggctgactacccctataagggggttgacggccgctgcgacaaaaccaggaaaaatgctcatgttgtcacaatcgactcgtacaaagatgtgccggtgaacgatgagaagtctctgaagaaagcagctgcaaatcagccgcttgccgtcgcaatcgaaggcgggggcagatcattccagctctacgattcgggaattttcacgggaagatgtggaaccgatctggaacatg

SEQ ID NO: 3094 - DNA, 365 bp, Lilium asiatic
  modified_base (338)..(338): a, c, g, t, unknown, or other
ggcaagcttccgaagagtcttacaagtaccctagagatactgaaagactgtacggaaacatggccagagctccacaaccgcctcagagagtcccatttgccaagcaaggaaaagtcgtcggaccagttatgccctatgaaaatggaagcataaaggacgcctacgatcccagacggttcatacgcaatgtcgtcccaccgcagcctactatccctccagcatactgcttccagaggaccatgatcaagccggagtcagagagggaaccgagcgctgcagaaggcgaatatgtacaacacataccggcccaacatttcatgccaccgaaagtgactcangacattgctatcgacatgagggccttc

SEQ ID NO: 3095 - DNA, 245 bp, Lilium asiatic
gcggcgcccttgatttcttgaaggatcttgatctgaagtgcatcaaaaatgggattggagctgaaacactgaagctcattgaggaagaagtgaactctcaaaataatggagaagtgaggaagcacattagggatctgatgcaagatacctcggagaaggtgaaagtactcaatgatgtcaagcctgatacctctttggatactgaagagactttcaacattttacttttcgtatctggtgctctg

SEQ ID NO: 3096 - DNA, 438 bp, Lilium asiatic
  modified_base (404)..(404): a, c, g, t, unknown, or other
aaagaaccaatcacagacggaggataaatatcactagagaagaggagagtggacgaagggaaagaaacctaccatgaaaattccctgacctaatgctttccaagaaaaaatgacaagtccgtcaccaattccttgatacacaggaatcagggatctgaagatgcgatcttattgtgtatctcctacattgaaatgtaaatcctgttgatatgatgatgttgtggtatcaacgatgtagtgaggatctggaatcaaattgtacccctaggctctcatatacagattaatttcttttgtctggccctccccaggatgaattctagaattcactattgtcagaagatgacatacaaggccacttgtttccatcagagtaaaccctgagacgtatgagtgccacaaanaatttacacaccggccaacgaacctgctttttcc

SEQ ID NO: 3097 - DNA, 304 bp, Lilium asiatic
tttcaagaaaaaaatcagttaaaagtaaaatgttttaattatcaatagaatggatactgttctgatgaatgatatgaaccaaagaagttaaacatcattaatgtaatttttaatgttttatatattttaagatcttttttctagttgaatctcatcctttatggattatagactcgggaaataaaatcatatagcaaaatattataatgctttctttgaatattgtataatcctataatgagcgagttaaatatttgtggaaaataactcaagtgttataattaaaggaattaatacctctaat

SEQ ID NO: 3098 - DNA, 60 bp, Lilium asiatic
tcggataaacctatcacgcgcccgttcagctatttactggccgagacacgcaagcacgct

SEQ ID NO: 3099 - DNA, 378 bp, Lilium asiatic
  modified_base (280)..(280): a, c, g, t, unknown, or other
ctccccctcgacactccgctgtcgcttggatcccctttagggttttggttctcctccaaggtctctcaagatgaagctcgtcaggtttttgatgaaactgaacaatgagaccgtctcgatcgagctcaagaacgggacggttgttcatggcaccatcacaggtgtggatatcagtatgaatacccatttgaagactgtgaagctcacagtgaaagggaagaatcctgatactctggatcaccttagcgtgcgtggtaacaacattcgatactatatcctncccgacagcttaaatctggagactttactggttgaagaaacacctaaggtcaagccgaagaagccgactgcagggagagcaatgggccgtgggccggg

SEQ ID NO: 3100 - DNA, 421 bp, Lilium asiatic
agaccagatcgaggaaatattcgaagtgggctctgcagttcttgcccaaaggttagatgccgaatatccaatatgcaacatgttcaagcttttcatatgtgcggtttgccaagtagaggtcaaaccggaagaaggcatttcggtacatgctgattcaacggagcctgaaaaattgcgtacctggtatggtccactcctatgccaaagttgccaagcgaaaaaagaagctatggaaggaaaacggagttcaagagggtcttcgtctagaaatagtacaggaagtgaatagtctgccaaataccatctatgtttctaaatatcacagtgcaagctgagtttcggagtttaaaggcgaggaagtaatatttatgctccttccatgcatatttggcaagctgattgagacctactataacatgaa

SEQ ID NO: 3101 - DNA, 350 bp, Lilium asiatic
cccacgcgtccggttccctgccggatcagccaacactggggaggaaagggattcaaagctcccaaggccaatgcaacttcgtgatggtctttggccccatcgtggccgctacaatggcccgcgttgtcgagatgtaaatattaatcaaggttactgcccaccaccctcgccttgattggtctctatgaatttggtgttgaaagaagctggagtaagtgtagaaagttggtttccaaaaagaatgttgagataaattgtctgaaaatgtactctacatgagatggcattaaataagttatctagatgtactactagagatgttatacaacatctataagtgtaggagaaaa

SEQ ID NO: 3102 - DNA, 390 bp, Lilium asiatic
cccacgcgtccgcgccatgggccgccgtcctgcgaggtgctatcgtcagatcaagaacaagccataccctaaatcacgatactgccgtggtgttcctgatccaaagatcaggatctacgatgtgggaatgaaaaagaagggagtagatgagtttcctttctgtgtccatcttgttagctgggagaaggagaacgtgtccagtgaggcactggaagctgctcgtattgcctgcaataagtacatgaccaagtttgctgggaaggatgctttccatctaagggttagagtgcatcctttccatgtgctccgtatcaacaaaatgctttcatgtgctggggtctgatggctccaactggatgagagtgctttggtacccctagaacgtggcta

SEQ ID NO: 3103 - DNA, 378 bp, Lilium asiatic
gaggggagcactgcctctaccactatgatcatggggtttgctcctgccaagggggagtttgaggggtttgagatgtatgctgagaatggtggctgtggctgcaagtgtggtgataactgcaactgcaacccctgcaagtgtggcaagtgatctctccatggagaagaggatgtagggtttgataccctttgtttacttgtttctgctgtagtgctgaataatggccatgggtttatatgatgcaagtctttttgcaccatgagtggttgttcaccagtggcttaatgtcttgtggtggtgctgtgttggctttgtatggtctgttgaaattactgaagtgttgtttttagtgtctttatctaaatggaaattattgag

SEQ ID NO: 3104 - DNA, 111 bp, Lilium asiatic
ccacgtcccatccaatcatttaagagaaagaacattcacgtagtccgtgtttctgcgggtgataaacatgctgttgcactagattcaagtggacatgtttatacatggggc

SEQ ID NO: 3105 - DNA, 388 bp, Lilium asiatic
  modified_base (354)..(354): a, c, g, t, unknown, or other
cccacgcgtccgctgtcagaaacatagacagcgtagtgataaccatcccaaccccctgcctctgtagaagggtgatcccaccatctatcttcgtgatacggctgattgcagggacaagaaatcggtcatagatcgggataaacactatcaacgcgaacatgcctacgctggccatggatgctgcagggatctgaaatttccgtcccaaatggcgatccatcttcaaagactgcagcaccgcaaaggtccactgttgtgatattgccagaaagccgatgatgctagaagcccatataggcatgatccgcatcaagcatttcacctcctcaatctgctgaatgctgcagagcctcncctttatttgcaagaaatatacctttagctctct

SEQ ID NO: 3106 - DNA, 364 bp, Lilium asiatic
cacaaatagtatcactctccaactccttaatgttgctgcctctagtctatatatcattgaatttcttccgattctctctctccttttccatggcaaagtccatagacattctagtctgctacattccagtctcaccaagaactccaaccctaaggcactcccatttcttctgatactgttcgtcgagaagtatggcatcatggcaccgtcgaaatcagaaaggtagaaggagcaaaaggatacgagttgatggcgtttaactcaagcgtgttcggcctttaccgacgtatggtcacgatcggctctctctcgacgtacgggccctggcaaagatccagtaatcccccgatgatcgctctactga

SEQ ID NO: 3107 - DNA, 426 bp, Lilium asiatic
ccacgcgtccgtgttgatcagttggatagctcagttccagagtttcggagtatatagcttgttggatagcttactcaaatattttgtaaatcagaccaattcaaattaaagctaaggagaaagaatggctatagaagaatacacaaagaaggcatatcttggtgagagtgatgacgatgatgcacctttagtttttaaaagaaataaaactgcttccaagcatggccagtcgagttcagctccaaacagagtaccttctcaaaaccctgacgagtctttggggaggattggttctcccaaaggcgagatctcaaactcagaaaaagcgaagttgccttcaactgcgaagttatcagctgaaaaatcttccacaatgagcaaagtttctccagcttcacagtcgagacattcttcagaaaatagaat

SEQ ID NO: 3108 - DNA, 419 bp, Lilium asiatic
agaccaggtcgaggaaatatttgaagagggctctgcagttcttgcccaaaggttagatgccgaatatccaatatgcaacatgttcaagcttttcatatgtgcggtttgccaagtagaggtaaaaccgggagaaggcatttcggtacatgctgattcaacggagcctggaaaattgcgtccctgggatggtccactcctttgccaaagttgccaagcgaaaaatgaagctatggaaggaaaacggagttcaagagggtcttcgtctagaaatagtacaggaagtgaatagtctgccaaattccattttattttctaaatatcacagtgcaagctgtgtttcggagttgaaaggcgaggaagtaattcttttgctccttccatgcatatttggcatgctcatcgagacctactataacatg

SEQ ID NO: 3109 - DNA, 412 bp, Lilium asiatic
cggacgcgtgggtgcaaacccatttcctcagctcgagaaatatggtgaccagtggcaagtcgaagaagggcaccggtggcaggatcggcggcggtccgaggaagaaggccgtctctcgctcagtgaaagccggcctccagttccccgtcggtcgtatcgggcgtttccttaagaaaggacgctacgcccagcgaatcggcaccggtgcccctgtctaccttgccgccgtgcttgagtacctcgctgcagaggtgctggagctggcgggcaatgctgcgaaggacaacaagaagaaccggataattcctaggcacctgctgctggccgtgaggaacgatgccgagttggggaaactgttgagcggcgtcaccatcgctcatggtggtgtgctgcccaacatcaactctgtgct

SEQ ID NO: 3110 - DNA, 221 bp, Lilium asiatic
gcacctccaatacctggcatgggaggagttggtggtcctttcgcaggtccacctccgatggggatgcctcctatggggatgccggcgatggctcaatatggcatgcccccagtgggctattagggttggcgatggttgatgttcaagaggataactcatgaaacatcgttttcgtattgagtgcagtgacaaaaggactttgacatgaaaacaaccttaag

SEQ ID NO: 3111 - DNA, 413 bp, Lilium asiatic
  modified_base (380)..(380): a, c, g, t, unknown, or other
cccacgcgtccgcccacgcgtccgcccacgcgtccgagtgggggcgtctaaacaaggacactggaagcaatcctcatggatatttacccacccattacgagaaggtccaaatgctcctcagtgatcgcttcttgggattctacatgattccgagtgatggcccgtggaactacaactttatgggagtgaagcatacagtaggtatgaggtatggtgtaaagcttggcacgccgagggactactaccacgaggaccatcggccgccacattttctcgagttcagtaatctggagggtgataatgttgagggagaccgggaagatacattctcgtaaggagctcgggtctgtctcatataatatgttgtgttaagttctgtncaactggagattcagggtagtattactgcttac

SEQ ID NO: 3112 - DNA, 192 bp, Lilium asiatic
cccacgcgtccggcttcatccatttgcctaaagtatttatcatattaactatgaatcattcattttcctaattttcagctaaaattattaaactaggataacaatcccaaaatgactaatgccacaaaatttcctactatttcactcaatgacatcttataaataggaacttaagaattttattacccattt

SEQ ID NO: 3113 - DNA, 413 bp, Lilium asiatic
cggacgcgtgggcggacgcgtggggttccccatgttactcgtactgattatcagctcattgatatctcggaagatggatttgtgagccttctcactgaaaatggccatacaaaggatgacctgaggcttccaactgatgatgccctgcttacccaaatcagagagggatttggtgaagggaaggatctggtggtgagtgtgatgtctgctatgggtgaggagcacatctgcggtctcaaggatattggccccaagtaaatgattggtttatttattagtataatagatccttcctaattataatgggtctattttgaacttaaaaaaatatatagttggggtggaaactgaaaatatgggccgtgattgctagtgcatgagcctaaggtagggtggttttatttattactgtc

SEQ ID NO: 3114 - DNA, 342 bp, Lilium asiatic
cgatgatgaagataataactcggatgattatgataacacccctgttaggaaggataatggttttaaaaggaataaagctaggaacgatgaccacagtaatgacgacagggacaaggacgatctgaaggcggcaaaacgataaaatgatgcttaccataggacaaatatgaacactaaggaaatatgctttacgctaactacgatatctttgggttgagtgggcatgcctagaacctcttacaagaggctagaactgtgatgtatggagaagttggttactattttctcaatgtcgaactaataaaccaccttttgaaatagtttaatccctttgctttttta

SEQ ID NO: 3115 - DNA, 234 bp, Lilium asiatic
  modified_base (124)..(124): a, c, g, t, unknown, or other
gaaaaaaaaaaaaaataaaaaaaaaaaatttataaaaaaaattaaaaaaaaaaaaaaaaaaggggtaaaataaaaaataataaaacgggagggtgtgttaatttaaaaaattttatgattaagnacgctttgatgctaattaaattgtttttttttattttcaccataatttaaattcattggtcttctttttaaaaatttattgattggtaaaaaccctttcttttccaaatt

SEQ ID NO: 3116 - DNA, 418 bp, Lilium asiatic
gccaaataaaatggcgaattctagagtgactagtcgctttcggtctctccttcagtgtgttttataaagttaagagtcgatcatggatactaatgctacatatcaaatatgtcctcacatagagtggttcattaattttgagaaacttgatatgagctcagtggtggtcgggaatgatttgtgcaagacgcttggtatttgaacaattatagttcaaatgtataacggaatggtttgtgaattgtctgatgtgaggcatattcgtttacaaaaatctgatcttaattggagtacttgaatcagaggattacaaagcttctattcagggtggcatgttgaaagtttttaagggtgttatgcttgtaatgaaaggaaacagaggaaaaatctatattatctctagagtactatggtgaac

SEQ ID NO: 3117 - DNA, 178 bp, Lilium asiatic
aaactaacttgctctaaatcttggtctagagtttcagttggaacacctgctagtatccactaatttccattttgatgacggaattttttctagaattcaaataaaaacaagaacactatttcaaggtaggcagcagctttaataaattttacataaacaaactcaaacacacacttac

SEQ ID NO: 3118 - DNA, 260 bp, Lilium asiatic
tcgggggaatgagtaggaaacacacaatttcttgtgtaaccagcacctgaaaggtggggagcatgattgtgcggctatagagctgcaacactgagttgcatgctgatctccgctaacagccttggattgctcaatgctgtataagaactttacagtcttggatctggcacggtgggggagttaaacgagagacttgcatacctaggcgatatagttttggatatttcttcatatgctgctcttcattgataggcatatat

SEQ ID NO: 3119 - DNA, 256 bp, Lilium asiatic
catgcatggcatgaccattgggtgttctgggttgggccattcattggagctgcccttgctgctgtgtaccaccagattgtgatcagggcaatcccattcaagagcagatcttgaggatagtaatacttgtggtggttcatttccaagtgtgttgtgggctctttttttttgtgtggatctttagcttttgttttgatccacggtctattctcaatggggtaatgatggaagattacttatatgaacgtaatgtgtg

SEQ ID NO: 3120 - DNA, 408 bp, Lilium asiatic
cccacgcgtccgcaacctctcgtcaatcatgtctgggcgaggcaagggagggtaggggctcggcaagggtggcgccaagcgccaccggaaggtgctgcgggataacatccagggcatcactaagcccgcaatccggcgcctggctcggcggggcggagtgaagagaatcagcggcctcatctacgaggagaccagaggcgtgctgaagatatttctggagaatgtcatccgcgatgccgtgacctacactgagcacgcgcggcgaaagacggtgacggcgatggatgtggtgtatgctctcaagcgccagggccgcaccctctatggatttgggggttgatgtttttactgtctctcatgggtctgggggttattttgggttggaggaattctgttgcatattcttga

SEQ ID NO: 3121 - DNA, 164 bp, Lilium asiatic
ccaatcctagatttcaagactttccatagctgaaatggaaactggatccaaggccaagaagggagctggaggccgaaagggcagcagcggaccaagggccaaatcagtgaccggttcaatcaaagttggcttccagttcccggtcggcaggattgggcggactt

SEQ ID NO: 3122 - DNA, 384 bp, Lilium asiatic
aaagcttcaacctctcgtcaatcatgtcatgccgtggcaagggagggaaggggctcggcaagggcggcgccaagcgccatcgcaaggtgctgcgggacaacatccagggaatcaccaagccggccatccgccgcctggctcgccggggcggagtgaagaggatcagcggcctcatctacgaggagacccgaggtgtgctgaagatctttctggagaatgtcatacgcgatgccgttacctacactgagcacgctcgccgcaagactgtgacggctatggatgtggtgtatgctctcaagcgtcagggccgcaccctctatggctttgggggttgatcttgttctcccctgcctgggctctgtttgttttgttggatggaatttg

SEQ ID NO: 3123 - DNA, 401 bp, Lilium asiatic
cggatccggaatgcggcaagggatctgctgacgctggacgagaagaatccccgtcggatctttgagggcgaggcgctcctccgccggatgaacaggtacgggctccttgaggaggggcagaacaagctcgattatgtactcgccctcaccgtcgagaactttctcgagcgtcgcctccagacccaggtcttcaagtccggcatggcgaagtccattcatcatgctcgggttctcatccgtcaacgccatatcagggtggggcgtcaggtggtaaatatcccttcattcatggtgagggttgactctgcgaagcacattgactttgctctcaacagtcctcttggaggtggggtggcctggagggtgaaaggaagacctgaatctgcaccaaaagccctgat

SEQ ID NO: 3124 - DNA, 325 bp, Lilium asiatic
cttgactcttgtgaaggcatttggtgaatgtcgtccattaagagagcttgcgaacctaacattgatactgggtaatcgtgagaacattgatgaaatgtctggtacaaatgctgctgttctcatttcaatactcaaattaattgacaagtatgatatgtatggtcaagtagcatacccaaagcttaacaagcagtttgttgttccaaaaattattggcttagcagaaaaaccaaggggggttttattaattctggcttacatggaaccatttggccttaccttaataaaggttgttgttaatggcttgctattgggggcacaaaaa

SEQ ID NO: 3125 - DNA, 344 bp, Lilium asiatic
  modified_base (48)..(48): a, c, g, t, unknown, or other
acgcgacacttggggcatttatttcatcgggtccttccctaaatcacngactggtgaatatgtacttgttggtggggattatgtttcaaagtgggtcgaggcccaagcctgtacgactaacgaccaccgtgtggttgagaaattgctgcaacaccatatattttcctgattaaggatgcctcgtcacatcattattgatggaggcaaacattttagcatcataccatttgaaaccctcatgcgtcgccacggtattcatcacataattgctgccccttataacccacaaaccagtgggtctgttgaaattttcaataaagcggtggaaatgattttagagaaaa

SEQ ID NO: 3126 - DNA, 249 bp, Lilium asiatic
cccacgcgttcgcctgctcaaataacatgtggttagaggtttcttccgtagtgcgcggcctaccttgattggggacagagcccaccgtgcttgcaagtcagtgatctatgacttctttatgaagtactattccgacattgctggacctgattttactgataaacacaagaccctatatctaccttgctgtctctgcttctgctgaattgattgctgatgtaactatctgccctatggatgcagtgaatg

SEQ ID NO: 3127 - DNA, 286 bp, Lilium asiatic
tcggagaaattcaaaaggtagcccgtacagttatgtgtgggccgcggcagtgaaggaggcggttctcgaaaatcagggtggtgttggtggttatggttatccggcgttggttgctcttaatgtgaagaaaggcgcatatgccccacttcgaagtgcttttgaactggaccagatcaccgagtttgtgaaggatgcatgtcgcgttgtctagtgaaacctgccactaagcagttttcccacaatcgccgcaacctaaccgtgtgactgttaatatggttaggtcttg

SEQ ID NO: 3128 - DNA, 229 bp, Lilium asiatic
cccacgcgtccgcccacgcgtccgcccacgcgtccgcccacgcgtccgcccacgcgtgcgtcaggatatcattgcgattttagggatggatgagctcagtgaagatgataaattgactgtggcccgtgctcgaaagatccagcggttccttagccaaccttttcatgtcgctgaagtgttcactggtgcaccaagaaagtatgttgagttgaaagagagcgtcaatagc

SEQ ID NO: 3129 - DNA, 401 bp, Lilium asiatic
ggtttacacatagggaaagaggggaaatgggttccggttaaacctatggttgatgcttgtgttgtcaacatcggtgattctcttgagatattgagcaacggaaaatatagaagcctcaagcatagggtaatgatgaacgccgagagtgagcgtctctctgtcgctacatttcatggaccagatggaggatgtatgcttggtcctcttccagaacttgtgagaggaggcaaagagaattacatgactatgcgccatgcggagtatttgaagaaatccatatctgaaaagcaggaagggaggagcttcttagacaaaatgaggctggaatgaagaaaccatgccaatcctttttatggataattccgaggattaatttcatgaactcaattctatgtaactac

SEQ ID NO: 3130 - DNA, 370 bp, Lilium asiatic
cgcgtacgggtttacacatagggaaagaggggaaatgtgttccggttaaacctatggttcatacttgtgttgtcagcatcggtgattgtcttgagatattgaacaactgaaaatatagaagcctcaagcatagggtaatgatgaacgccgagagtgagcgtctctctgccgctacatttcatggaccagatggaggatgtatgcttggtcctcttccagaactagtgagaggaggcaaagagaattacatgactatgcgccatgcggagtatttgaagaaatccatatctgaaaagcaggatgggaggagcttcttagacaaaatgaggctggattgaagaaaccatgccaatttttttatggaataatt

SEQ ID NO: 3131 - DNA, 413 bp, Lilium asiatic
cgactagggtttggttttggacctcggttgaaattattggcggcggcggccatggcaccattcaacgtggtgcagagggagcggctcgcatacacccaggagaagaagcggcagctccatggccagccgggcactggaaagcttaagcagcggactgcgcccatcgccatctccggcaagcgcaagcgtaagctcttcaagaaatggcggcgggagcaaaaggaggcggtgcagaaggggttgatcacgatgggagatgtcgaaatggcggttgctgaggggagttcacaaaaactgagtgagaaaactctgatgaaatttcacatgaagaaggggtcgaagctcagaaaataaaagatcaaaaggcaagcaagagtagagtaatctggcaggcgcctgtacaatgcatggtg

SEQ ID NO: 3132 - DNA, 328 bp, Lilium asiatic
  modified_base (176)..(176): a, c, g, t, unknown, or other
tgatcattccttggtgtcctaattgattgaaatttttgtatgtcattgctaatatgaatagtagttgcagaatctatccacaaagtattcttaagtattaaaacaaaattaacctcactacaaactaaaacatgattattattacctttctttgctaaccattgcttgtgcttcangcaattcgacttcatatggacgaatttcttacaaaagaacgatttggtatgcttattcttgattatttgaggtttggacactcccaatagaatacctatagcttggtcctttcctttgtattttgcaccctgagctttcttgttctttctat

SEQ ID NO: 3133 - DNA, 418 bp, Lilium asiatic
cccacgcgtccgcctgctcaaagaacagggggttagaggtttcttccgtggttgggtgcctaccttgattggttacagcgcccagggtgcttgcaagtttgggttctatgagttcttcaagaagtactattccgacattgctggacctgagtttactgctaaatacaagacccttatctaccttgctggctctgcttctgctgaagtgattgctgatgtagctctctgccctatggaggcagtgaaggtgcgtgtccagactcagcctggatttgcaagagggttgagtgatgggttccctaagtttgtcaagtctgaaggctatggagggctgtataaaggactggttccactttgggggcgtcaaattccttataccatgatgaagtttgcatcttttgagacgattgtggagatg

SEQ ID NO: 3134 - DNA, 368 bp, Lilium asiatic
  modified_base (329)..(329): a, c, g, t, unknown, or other
  modified_base (337)..(337): a, c, g, t, unknown, or other
ctgaagcaagagaggtccagcgagagatctgagctcgatcgcccgaagatgagggcgaagtggaagaagaagaggatgaggaggctgaagaggaagcgccgaaagatgaggcagcgatccaagtagatcctgatgcagcggccttcatcatgtggaagatagtcgatggtcttacatcttgccggtctttcatcttgctgttggtttctctgttgatgtctagcatctaaatttcctgttttgcagctttagtaggttctaagactttaaatgttatgcttttgttgacaatgtgtgagacaatggtgttgaaccatatttgatctctnttgagatngttaatgttgaagcgtagttatttctagatt

SEQ ID NO: 3135 - DNA, 278 bp, Lilium asiatic
ttattataattatggtcaggcagctaatgaaaaagcgacagatactttgtacccttcaccggttgattggtgtgtgggagaggtaaggaaacttgcatctggtggtggtcattcagctgtattaactgattcgtgctccttgaaagaactgtgctagttcaggctatcagagaatgttaatctgtctaactcttttatgattgaggatgtatcatatctgactggtgcatattccttgtcttgactttgttaaagattgatggatcaccaactttaac

SEQ ID NO: 3136 - DNA, 407 bp, Lilium asiatic
cggggatccgtgtggtggagagttttgcttcctcagagaatagtctagagtctgctttaaagaaagatacacctcagagtagtgtttcaacgaatgggtcgcctccttcgccttctgaaacctctcaatcgatctccggtccgtctgaggtctcggcatctctgaccaagaaagacaaaatcatagaagcttctgagggtgaaactgattcctctgttgcaatgtcggacaattcgtacgtctcaccgggtattcacatcaactttgagcaggaggaaaccgtcatacaacaggacatagtcgacatgtacatgaagagcatgcagcagtttactgacttttctagccaaaatgaagcttccttggtatggagacgagcagtccacacagaaatgctacccgagtct

SEQ ID NO: 3137 - DNA, 307 bp, Lilium asiatic
catcattcagcacgcgataacgccactgagagtttcttagattttactgccgtaatcatcagaaaatggaagcattgtaacctaaacattgaagtcaattctatttactgatactggatgggtggcgcacttaaaacatcattgctgtatatttatggtgttatgattgcggtaatgaggctctgggcgttagactctggtgttagaacttttcatgatttggaagcatagtatttgaggttgcagattagatttatatggagttgatgcaagcaactgggaatgtggagttgaagcgagcaatcat

SEQ ID NO: 3138 - DNA, 330 bp, Lilium asiatic
  modified_base (65)..(65): a, c, g, t, unknown, or other
gtgagatagctcaagacttcaaggctgacctccgcttccagagctcggcggtggcggcgctgcangaggcatcggagtcttaccttgttgcactgtttgaggacaccaacctgtgtgctattcacgcgaagaaggtgactatcatgccgaaggacattcaactggcgaagaagatccgtggggagaaggcttgaagatttgggtttcttattcgctacttgcgaatatgttggattcacttgttgaatttgtatgtgaagttgcttggtttgggttttctttgggagttgaaaccttgttggattatctaatcagtatgaattatctttc

SEQ ID NO: 3139 - DNA, 405 bp, Lilium asiatic
tgcagatcaaaacaaggctccgaagggtacacacttgattcctttctcacagttccctctaaagaaggtgcgcaaagattgtacttattacacaaccccagcaatgaaaattcccgcaacattggaaaatgtacattcatgtgagaattggctaccaagaagggtgatgagtgcatcgcgcatcacaggaataatacatgttttagagggttggaacacacatgagtgtggagatttgatgttggatgttgagaaaatatggtcttctgcactcaatcatggattcattcccttgactcatatttgatcgactatatctaactaagagagcatatgttgtaatatataaaagtatgtcagaattatgtatgtgtggcgtcattcagaatttaatatgaagttgga

SEQ ID NO: 3140 - DNA, 375 bp, Lilium asiatic
  modified_base (95)..(95): a, c, g, t, unknown, or other
  modified_base (97)..(97): a, c, g, t, unknown, or other
cgcgtacggcgccgtcagacgtaatttctatatgttctgtccggtacatattttaggagaagaagtgtaactgatgttgcagcacgtgctcaaananacacttgtaccagtacatgtcttataagaggaagaggaattgatgtacgagcaattcctaggagagacactggcactggcagatttcatcgagcaaacaagtaatgaactcgaggattctgatgacgagctcgagatggcatatatgctaatgcagatgggtttagatgcatcggattcgtcgaatgacgatgataccaaatccccgtgatgtgttgtcctcctttagtttctgaaatttggtattttgagggcactgccccatgtgggattggagct

SEQ ID NO: 3141 - DNA, 178 bp, Lilium asiatic
atccccccgaagcaagaagatgccaccagcccactctccggctggatcgtcgaatccgtcaaggctgtcaaattcatcaacaaaccttggttcaaggtaccatttggaacatatgcagttgaactcgttgcggggagggaaagtgccatcgcccaggtcatcaggaccgtccccaaaa

SEQ ID NO: 3142 - DNA, 398 bp, Lilium asiatic
cccacgcgtccgcaatctcagcaaacccagttcctcagttcgagagatatggtgaccggcggcaagtcgaataatggcaccggtggccggatcggcggcggtccgaggaagaaggccgtctctcgctcagtgaaagccggcctccacttccccgtcggtcgtatcggacgtttccttaagaagggccgctacgcccagcgtatcggcaccggtgcccccgtctacctcgccgccgttctcgaatacctcgccgctgacgtgttggagctggcaggcaacgctgcgaaggacaacaagaagaatcggataattccgaggcacctgctgctggctgtgaggaacgatgtccgattggggaactgtgagcggcgtacatcgtcatggggtggctgcgacat

SEQ ID NO: 3143 - DNA, 413 bp, Lilium asiatic
cagaatcattcggttagaaatcagtgtgggcagactcgttcgtcagaaaatcgggtatgtccggccagaaatcggaaacaatcattatgaaatcattacaagaaatcaaatagagctattcaaaaagcagataatattctgagaacccagtagcggcacaagttataaacaccgatgattaccacataacccaatactgattcgttcaccctagtatcaatacataattggggcagaatccttcacttggaggtcagtacaagtatgtttgtcatgaattaaggaaaatatgtcagatacaaacactgaacattcatggaaaggttagtacgtttgcaaaccactacctttgctgagcataaacatcgtcatcatatacagtactaaaatagaatcaataggagtcattcgca

SEQ ID NO: 3144 - DNA, 304 bp, Lilium asiatic
acggaattttccttaatggccgtcgttgaattagcctccgtcgccccaattgggtctgccgcgcgcaccctggttgtgtcgacgaccaccgatgatgcccctctggcggttaagactgccaaggcgaaggccacagaagctctccaggagaagaaggctgtgacaaagaagccctctctgcatcctacctatattgagatgatccgtgaggcgattgtctccctgaaagaaaggaccgggtcaagccagtatgcaatctcgaagtttgttgaagacaagcacagggatcaccttccggcaaact

SEQ ID NO: 3145 - DNA, 246 bp, Lilium asiatic
acgggagttgtcaaagcatttgtttgagtcctaagttaaagatctctcaaattgattctctgcttgaggcttggaggtagcggggctacagcattgaaaaacatggatgggaggggtaattcttggggttccctcccctaattctttcgtggatttggtttaattaagtggcctttggacctggaaaagggattaaatacttttttggaaatattttttaaaatttagttatgtggctgatccccc

SEQ ID NO: 3146 - DNA, 299 bp, Lilium asiatic
ccacgcgtccgtgggagcaaatgtcatcctagaatattcttgtgacgaggcaaaccttgttctgcggaagaacttggaaaatgcgaaagccagtttagaagtcctgatcggggacttacagttcttgagggaccaagtgaccatcactcacgttacgattgctggcgtttccaacggggatgtttataacgcaaaattcacacgcgcgggaagggacacttatctcttgaagaaggagacacaatattagattagatcttctgtctggattctgtttgctattaaacatatattttctt

SEQ ID NO: 3147 - DNA, 287 bp, Lilium asiatic
agcccccaattctatctgccgatgtgtgaagcaccgatcgctaatcgccgcaaggctagacctaccaagctgagggcgagtatttcgcctgggactgttttgattctgctggctgggaagttcatgggaaaaaaggttgtgttcctgaagcagctcacgtctggtttgctccttgttactggaccctataaggtcaatggagttcctattcgccgtgttaaccaagctgatgtcattgggacatcaaccaaggttaatatatctggtgttaatgttgataagtttga

SEQ ID NO: 3148 - DNA, 250 bp, Lilium asiatic
ctaatcctaatctcccctcccttctcgaatggcccgcaccaagcagactgcccgcaagtccaccggaggcaaggcgccccggaagcagctcgcaaccaaagcggcacgcaagtccgctccggccaccggcggcgtgaagaagccccaccgcttccgccctggtactgtggctctccgtgagatccgcacgtaccagaagagcaccgagctcctcatccgcaagctccccttccagcgcctcgtccgggag

SEQ ID NO: 3149 - DNA, 307 bp, Lilium asiatic
  modified_base (85)..(85): a, c, g, t, unknown, or other
cggaaaaaccgggccgacgcacgcgtacgggagcaccacttcgagttcacagccgctttctgtgcatagaagacctacgccccancgtgcgggaacgatccgaaagaacggttacatcgtcatcaatggccctccctgcaaagtcgtggaagtgtctacctccaaaaccgggaagcatggtcatgcgacatgccactttgtggccatcgatatcttcacttcaaagaagctggaggatattgtgccttcctcccataattgtgatgtgcctcacgttaaccgtactgactaccaactaattgacatt

SEQ ID NO: 3150 - DNA, 242 bp, Lilium asiatic
ctcgcacttctggcattatatggcacattatctctggggcagctcttggtctttcacggggttctcattaaaaagggaatgcgaacatacgattacatatcagcaatgagagaagaaatgcgatcatctgatatattcgacgacttggacctatcgtccgatgaaagtgtcgatttcagctcaccagaaacacccaaccccgtctctcgcttcttatgcagagataaaagatcgactcaaaa

SEQ ID NO: 3151 - DNA, 263 bp, Lilium asiatic
  modified_base (55)..(55): a, c, g, t, unknown, or other
  modified_base (128)..(128): a, c, g, t, unknown, or other
  modified_base (186)..(186): a, c, g, t, unknown, or other
taacatgaactgctcatccataaaaaaatttttttatatatacttctcatccacnaaaaacacattcctcaaatttcaaaaccttcttccacttcttttatctacttcatctactctctacataacantcctaaaataactcaatcataacacctttaaccttctttttctcttttcttcacaatntaaaaattcctaaaatttcaatctccaatttacctttttaaaatttccctcttaataaaacttttttagcccccctt

SEQ ID NO: 3152 - DNA, 446 bp, Lilium asiatic
tttctctccagacttcaccgtcgccggacctctttctctccggcgatatgatggcgtctcgggcgaatctggaggttatgaagctccggcagaactacaggaacctctggcacaccgacctcatgagcaccatccaggccgattttcccttttgctgcttggcactctggtgtgggccatgtgtgtcatacatgctgcgcaagagagccctttataatgacatgtacaggtatgtctgatgggcgggttatctaccatgtagtggcaagcgtggagagagtaaatgcccagaattttgtctttgcacagaggttttcctatgctttggtaattcagttgcctcaacacgcttcttgctgcaagacgagttcaatattcagacgactcagtgtgacaactgcattatcggattcatgttctgtctgcaacaagctgcttgcatattt

SEQ ID NO: 3153 - DNA, 394 bp, Lilium asiatic
  modified_base (323)..(323): a, c, g, t, unknown, or other
cggcctccaaggagggggagaagaagaagaataggtcgaagaagtcggtcgagacctgcaagatctacatcttcaaggtgctgaagcaggtccaccccgacatcgggatctccagcaaggccatggggatcatgaacagcttcatcaacgacctcttcgagaagatggctcaggagtctgttcgtctcgcccgctacaacaagaagaataccatcacctcccgggagatccagacctccgtccgccttgtcctccccggcgagctcgctaagcatgcagtctctgagggcaccaaggccgtcaccaagttcaccagtgcttanggtgtgtttgtactatgtagctgtcaacttttgctgcttacaacatttctcgttgttggttggttggtttt

SEQ ID NO: 3154 - DNA, 342 bp, Lilium asiatic
ctagccccatttccttctcccaatctcagttctcgatggcgcccaaggccgagaagaagccggccgccaagaagccgtcggcgacgccgcccccagaggaggagaaggaggcggtgcccccaccggcggagaagaagccggcagagaagaagcccaaggccggcaagaagctgccggcctccaaggagggggatgcgaagaagaagaagaaggcgaagaagtcgatcgagacatacaagatctacatcttcaaggttctcaagcaggtccaccctgacattggaatctccagcaaggccatggggatcatgaacagctttatcaatgacatctttgagaagc

SEQ ID NO: 3155 - DNA, 112 bp, Lilium asiatic
gtaagcggtcattctatattattcaagatttaatattcgtgcatactacgtaagacctctgcgatagtgtgacatgaaatctgtatactttacaaaaactttatgatataga

SEQ ID NO: 3156 - DNA, 350 bp, Lilium asiatic
gcttcatcaaggtacatctatctactctcttgtcccctttatgtcttatttggattgttatgtgtaggattttggaaaagcttggatttgtgttgcaaaaaaaaaaaaaaaaaaaaaaaaaaaaaaaaaaaaaaaaaaaaaaaaaaaaaaaaaaaaactattaaaaaaaaaaaaaaaaaaaaaaaaaaaaaaaaaaaaaaaaaaaaaaaaaaaaaaaaaaaaaaataaacaaaaaaaacaaaaacttcggcgggcctttttaaaaaaacaaaaatttcctacccctgcaatccaaaataaaactttttttttggggcaacaaaaaaaaaatttaaggcggggtttttaaa

SEQ ID NO: 3157 - DNA, 333 bp, Lilium asiatic
ggcatttaaacatcaagatctgaggcgtcactatgattggattgatggaacttggctacgtgcttgccaggcactcaactttgatgactgaaggtttacagctgaaggagaatgctgcttatgataaggtaatgaccagagtcttgtgttatctagcctgagtctctgtttattgctattgtgaacatagtactattcctgtgaggatcctagacgagaagtggattgcaggaagtcattatgtccttaccagctaatgttttgctagaattaaacttcagtcctgttttgcctgtctgtcgttctgcagtataattactgttcagagttgtt

SEQ ID NO: 3158 - DNA, 401 bp, Lilium asiatic
cccacgcgtccgttctcctcaaagccctagttttcaacctaactggaatggagaccggatccaaggccaagaagggcgccggaggccgcaagggcagcggctcaagggcgaagtcggtgactcgctcagtcaaggcggggctccagttccccgtcggaaggatcggccgctacctcaagaagggccgctatgcccagcgcgtcggatctggagctccggtctacctcgctgccgtgctggagtatctcgctgctgaggttttggaattggctggaaatgcagcccgggacaacaagaagaaccggattgttcctcgacatgtgtgtctggcggtgaggaatgatgaggagcttgggaggttgttgggtggggttactattgctcatggtggagttttaccc

SEQ ID NO: 3159 - DNA, 444 bp, Lilium asiatic
aaaaggtcaaggccagacttggaggacggatccgcctgattatatctggaggtgccgcggggggcaccgagattgaagaattcttaagggtcaccagttgtggttttctcatccaaggatatgggttgacggagacgtgtggattgagttccattggagttcctgacgagatggccttggttggaactgttggatacccctccacatacagtgagatacgcttagaagaagttcctgagatgggctacaacccactagcagttccttcccgcggagaaatatgtgtgaggggtaagactgtattctctgggtactacaaaaatcctgagctgacaaaggaagtgattagagatggctggttccatacaggtgatatcggggagatgagccctgaaggcatcctgaagattatcgacagaaagaagaatatctttaaactttcac

SEQ ID NO: 3160 - DNA, 449 bp, Lilium asiatic
cggacgcgtgggcggacgcgtgggtttcaatgcagcagcaattgggaatcgtgaagggaagagttttgtgtgggagatccaggcctgcccgcctgttctcatagcgaggctatcacattctcagtgcaaatctgcagtcaggcagacagccatgtcagttgatggaagcaccatacttggctgctgtgaggatggatccatatggcgttgggatgcactacaataaaggatctgggtggtattagaccccaacaataaagggtcttggtaagtacttaactgagaagataagcatggcttgtaagatttgacaggataaagtagtgtctaaaatcccaagcagtatctgggttgtctgatgaagtttctttttatcaattagcgtaaactccctactgttgatgatgatgtcagtgtcttttatatgtggaaacagcggattgaaactc

SEQ ID NO: 3161 - DNA, 307 bp, Lilium asiatic
attaatttcaaaatggcacttttttctttattaaaaaaaaaaaaaaaaaaaaaaaaaaggaaggttttatataaaaaaaaacaagcactcacccaactaaactcataccaacctctatcactttatcattccaactcttccatccaacatacaaccctttccattactttcacccaccttcacttaactactctcccgcttcatccatattgacttggaatacactacaattccccatcttaatcctcttataccccatcactctttcctctttttccctacttccctttaaaccttaccctatctt

SEQ ID NO: 3162 - DNA, 440 bp, Lilium asiatic
gatagctgcagctgggtatggagtctatgctatggactatccaggctttggcctgtcccagggattgcacggctacattcccaactttgatgagatggttgactgtgtcattgagcgatacgctcaaatccgagctttggaagaggtgagggagctgccacactttttgctggggcagtccatgggaggtgctgtcgcccttaaggttcatctgaagcaagcaacggaatgggatggtgtggttcttgttgcgccaatgtgtaaaattgcagaagatgttacaccgccgaaaccaattttgcaagcattacgtctcatgtcatatgttcttcctgaagcaaaattattccctcagaaagatctagcagagctggcattcagagacccccagaaaagaaaattggctgactacaatgtgattgcatacagtgatcaaatgc

SEQ ID NO: 3163 - DNA, 291 bp, Lilium asiatic
agaaacatttggaagagcatgtctcgaatctgatgtcatcgaacatagtccagaccctggggacgatgctcgacacagttgtgttctgaggtgtagaactgtatgatagtatagactgcaactaagatgttgtctgaacggttagttgagtgctattatctttattttaggatttatagttcagtgcgcctttacttctgactttgcatgcgtctttttaactggaacacatgttttttgttacaaatttgctactgttgttttgaacaacattggtggctggtttttatc

SEQ ID NO: 3164 - DNA, 258 bp, Lilium asiatic
  modified_base (61)..(61): a, c, g, t, unknown, or other
tcacccaacatactccaaacccccgcccctattaaaaacacagccgcctctctaaaaatanaactctattatctacatacactccaactaaaatcattatcccaaacactaattgagtgctattatctttattttacaatttatacatcacaacccctttacttcttactttacatacgtaatctacaatggaacacactttttttcttacaaatttcctactcatctttttaacaacattcttacctcctttttatc

SEQ ID NO: 3165 - DNA, 368 bp, Lilium asiatic
  modified_base (33)..(33): a, c, g, t, unknown, or other
  modified_base (60)..(60): a, c, g, t, unknown, or other
  modified_base (360)..(361): a, c, g, t, unknown, or other
cgcacacgcgttgatgctctggacacgagcagnctgtatcatgtccaaggtaatccaatnaagctcggtgcgggatgtgactttcacttgctaccatggtgcgccactcatgctcgtgcaactcgcatccatagttttgcatcgagctggcccaagagcgttcctcgactgtcatctttcactcaacggtgagaccgttagattgaacgtagcaataccggtggactcacggacctgcacatggtcgaatgcaatgtccgacattttattattcatgaaacgagggccatgattgtgcacatagatcactcggtgctccagtaagggaagaaacattgagatagaagcaattctacacgnntacgcct

SEQ ID NO: 3166 - DNA, 378 bp, Lilium asiatic
  modified_base (374)..(374): a, c, g, t, unknown, or other
  modified_base (376)..(377): a, c, g, t, unknown, or other
agggttaacgataatgtcctactgttccgggaaaaaaataggatcagctaaatctcattcattgatgattatgtcgactcgcatctacattgcaagaacctgagggaggatgccatagactgagggtggtggtatgtttgggaaaggaattgggacaggggaaattggtggtttgtttttgttattgaggaagcatactatgggaggagcaaatttttaatataattggtatatatattcttttttttgatattgttgtcttcattgtggtatgttataatatcatctctagctacttttatttttatttttgtagtttggatctcgggcaattagtatttgagtatctttcaaattttatagtcgaaaaacananna

SEQ ID NO: 3167 - DNA, 338 bp, Lilium asiatic
agctaaggctgcagcgccgaagccaaagactgccggtcgccctgctaaggcagctaagacgcggggctaaagcagctcctgggaagaagcctgcaccggttgctgcaaagaagccgaagtcagtgaaaaaagctccagcggctaagaaggctccgttggccaaaaaagctacggtggtgaagaaagctaaggctgcgaaatagatgcgtttcccttttattcaattgactgtcagtttatttttcatataggcgggtagtcagttgtaaatttattaactgtaggggtgtgttagtgttatttgtttgcttatgttaatggaaaggcttgtttatttt

SEQ ID NO: 3168 - DNA, 453 bp, Lilium asiatic
cgcttcctgtttgggcatggcttggtgcgacggactggaggagccccgccttctaagcgcgcccgtgccttctactttaaatgtaaagcaagagaccactggaactctgaatttggaaggatccatcttatcattgcgccatccaagatcaggcacagcaactagttatgtcttcttggatgggttttttcaagagcttaattgctttaagcagtcacatggctctttgttcttaggggattacgtttgcgaagatggaagcttatatattacaacaaaagttgatccagttttcatactcttgccagtttttgaggacgctcgtatgaagaaagggagcgagaaagggatgtttaggcaattagatgaaattttatacgttgatggctaccctggttatcagcacctgaagtcgattgccgagaactctatgcaattggtttgtgaggtgaa

SEQ ID NO: 3169 - DNA, 155 bp, Lilium asiatic
gtaaaacgtggattaaatcaacctagtagttattttgaattgatatggtatgaaattatgatatatgttgcagctattatgtgtatcatggcatttaacctacaagggaatgatatttctgaagagattgccatgtgcatcatggcatttaacct

SEQ ID NO: 3170 - DNA, 236 bp, Lilium asiatic
ctgttgcaatgtagagatgaacctgttcaatgagcaagacaacccgatgactgtgaaggctctggctaggactgctgcaaagccttactgggcctttcccagctctgaaggcaagaagaacaatgcataaggcattggtctgtttggccctgggaggtgaagtaaaaattgtcatgcttattatctgctctcttttaatgcattcttaggacggcttattactggcttgctattgt

SEQ ID NO: 3171 - DNA, 419 bp, Lilium asiatic
cggggcttatctcctgctaatttatttggcgcttgtcactccgattgtgcatgatttctacaactatgactttgagactccagcattcatggagctttttattaagttcactcagaatctgtccctctttggtgcattgctctattatcttggaatgaagtactcggttccaaagaggatatcaaagaagaaggctcccaaatcgaaaacagtttgaggcgaggcgaagactgtagaggtcgggttgccatcagtaggcacattagatatcaaactctgcttgtattctcgtcttttttgcgatgggtgtgctattggactacccttattccatatgtggttggtaggtatacattatgttttaatcattcaatacctggtttgagacatcattgtagaaggatattcagagtagatct

SEQ ID NO: 3172 - DNA, 358 bp, Lilium asiatic
ggagctttttattaacttcactcagaatctgtccctctttggtgcattgctctattatcttggaatgaagtactcggttccaaagaggatatcaaagaagaaggctcccaaatcgaaaacagtttgaggcgaggcgaagactgtagaggtcgggttgccatcagtaggcacattagatatcaaactctgcttgtattctcgtcttttttgcgatgggtgtgctattggactacccttattccatatgtggttggtaggtatacattatgttttaatcattcaatacctggtttgagacatcattgtaaaacgatattcagagtacatctgttgtaacttgagttctgttatgttttat

SEQ ID NO: 3173 - DNA, 448 bp, Lilium asiatic
cagtgctttgaactgcctcttggtacgattgtggttccttgatgttatgcaccacagaaagaaaagcttgaaacactggtgtgtaagtgacaactgacgtgaaacccaagcactccgtctttcgacgaatgcgcccagagtggcgtggagctgcaggatcaggcaaaggaggcactgacgggccatgactgcattagcatgacgtggagctgcaggattagacaaagtaggcactgatggaccatgaactggctgggatggttatgtattagcatgatacttgcgcttcaggtgacgatagaaaaagtaaggcgtagcaggaggagctcgggcaggaggatacgaccgaggaggctgagcaaccgaagtaggggaaggtggtgtgacaagaggagctggggctggagtagacgactgactaggctgagtagccggagcatgggaaggt

SEQ ID NO: 3174 - DNA, 408 bp, Lilium asiatic
caaattcatggctggaaaggaaacattttcacaatggaaaaaatctgcaacagataagagggggtctacatcagcaatcagattctcagaacagtcaaagaaaaatgaaactgggaaaaatgtgcagaaatcacagcctattgaaccaaaaccggctcatagcaagatggtgagatttgtaggcggcaaatcgattgtagccaattctcattgccataaggtaacaaggataaattgagagagaaattacacaaggaagtagtgattgtgggatcatcagggagacttaatagtccaagtccgacggccatacaaaacgcacaaagttgcacaccgcatgaagttgaagtcatcacagaaaaaggagcttgttcgcaagagaaaagactggcagcaacttcgaaagat

SEQ ID NO: 3175 - DNA, 433 bp, Lilium asiatic
  modified_base (397)..(397): a, c, g, t, unknown, or other
attcaacagctatctttcccaggattcatgtaaaggatccatacagacggcttggaataagcagtgaagcttctcaggatgaaattcaagctgctaggaacttcttgataaaaaaatacgcagcgcacaagccaagtgttgatgctattgaatctgctcatgataaaataatcatgcagaaattctttgaaaggaaaaatcccaaaattaacttgaagaaaaaagtgagggaagttacccaatcacgtgctataaaagcagtcacaaataggtttgaaactccaacaaggaatgtcattataaagacaacagttgcattcttagctctcggaatactcactgttctgtttccaactgaagaagggccaacactccaagtggcaatttctctcatagnatctatatatctgatatttgaaaggctaaagaatcg

SEQ ID NO: 3176 - DNA, 387 bp, Lilium asiatic
tcgaccactctttcgcggacgcttggggttacctttaaagatcatcttctactgtctgagcagagcaccttatgacggacagacatcagctataccgaacgatttgatagataaaaacatggtggagaggctaccacacatggtggagaaactccaacgtgagggcatgcttaccatcttccacactaccgcctggcagcgcatgcttaactccgacaatacaacagtggctgataaaacgtcactggcgtctatagcatgtaattcactcaagttcaacgaggatggatctgcatatatcattcacggcccgatgaacccggtatgagacatcaatgtaaagagggtgtggttcaactcaatgctcccatactacaccattgaact

SEQ ID NO: 3177 - DNA, 319 bp, Lilium asiatic
cccacgcctccaccaactcgtaacttatatttctttcgaccactttaaaaaatcccggccggctttctttaacacgcggcctgataaaaataatatagccacacctactttcaatgcacacacccgcacactacaaaatcgtgactggctaaaccctcctgtcaacgatcttaatctcacacataaacactatgttttctctatttcaacaccaaacgatgatgccacatatctatcgtcttcctcatcacacacgtactaccaatctcgaatggctcctgtctattctcatcacattacactcggacattgtgtctat

SEQ ID NO: 3178 - DNA, 447 bp, Lilium asiatic
  modified_base (439)..(439): a, c, g, t, unknown, or other
ggaggacatcttcttacgagacttgcggagtaagggctctcctttcgtataacttcagatgcagttgaaaagtcaatcttgtggcaaatgagtttgcccgatcaaattgcgcaggtttcatctgtgggagcagaggtaccatatatactgttcgttttccaggctgaggacttctgtaatcttgtgaatagtgggtctttcatggatcatgttaatagggttcgaagtcaatatccatcattcacaatatgctaccttacaaataaactaatgagttatgtcaacaagtgtgagcaagctcattacaagaacccaggaaaggatggttctttcaaaagaccacccgttgaggaggttctatcaaagctaacaactcattttactaaagtgcactcgaggcaatgcattgatgaagctgaattagcagagcatattgtangcttaact

SEQ ID NO: 3179 - DNA, 408 bp, Lilium asiatic
aaaaaagaaaaacaagaggaaaaagcttaaagatgtgactgtgagcgatggggaccaggaaaacacggaggacaaagttgataccactgatggcgagcagaagacacatgaggactctgaccaggaactgcctaaagacgagtctaatgagcaagaagtaaagaagaaaaggaggaagaagaaaaagaacaagaatgttgttgaggaatccaatgaccagttggttgaagtgaaagtggctgaggggatggatgatccaaaaccatccaaagctcgggagttccccaatgggttgatcatagaggatgtatcaatgggaaaacctgatggcaaaagagccactcctgggagcaaggtttcagttcactataccggaaagttgaagaagaatgggaaaatatttgactc

SEQ ID NO: 3180 - DNA, 413 bp, Lilium asiatic
aaaaaagaaaaacaagaggaaaaagcttaaagatgtgactgtgagcgatggggaccaggagaacacggaggacaaagttgataccactgatggcgagcagaagacacatgaggactctgaccaggaactgcctaaagacgagtctaatgagcaagaagtaaagaagaaaaggaggaagaagaaaaagaacaagaatgttgttgaggaatccaatgaccagttggttgaagtgaaagtggctgaggggatggatgatccaaaaccatccaaagctcgggagttccccaatgggttgatcatagaggatgtatcaatgggaaaacctgatggcaaaagagccacttctgggagcaaggtttcagttcactataccggaaagttgaagaagaatgggaaaatatttgactcaagtc

SEQ ID NO: 3181 - DNA, 210 bp, Lilium asiatic
gccattctatcagcagccccttagctttgagcatcgtccaaactactagggctagagttatgtttggtggttggactgcttatttcagttttagcgatggatatggagtctgttagtccttcagctttcttgtttagacttagctttggtgaacattgtctggtttgtcattatgatcatactttatgaaactcttcctgcatactttac

SEQ ID NO: 3182 - DNA, 406 bp, Lilium asiatic
ggggaatggaatacaaaagttatcttgcattaatcgactcatatatgaatttgcagggggggtaacactgaagaattcattgatgggcacttcacgggaaatcttggagaaatacttataaggtgcaacaatgtactgtacctccgtggcgttcctgaagatgaagaaattgtagatgcagaatgacgtccggtgcaacaatttacgtggcatttctgagaggatgaagaaatcgtacatgcagaatgatgttgggcaagaaccttataatcctgtttcgactcttcaaatatatctgcttaatattcactggttttatcgtaaatcatgtgttgcatgtgcaacttgatgctctttcgagtaccaacatcagcgactagtacgtgttacttattttcagggctat

SEQ ID NO: 3183 - DNA, 440 bp, Lilium asiatic
cgagttcaccggtggaaccgccgccggattgatccggacggagtcggaggagaagagggcggccgtcaacgccgagatggagagagtcaaccagctcccgcacactagtagctactatctgcaccggatgcgagtgctcaacaagctcttacatcttctgtccattaataggactttgtcacaggatgaggaattggagctgctttttgccggcctctctctgtgaagaggaaacaagggtagctgtcctcagtgctgatgggaaaatggtattaagaggtatcgtagcgcagcaatgtataaatagagtttgcaagacgaggaagcggtactgtaatataatcatgctttcctcctatgttggtaaatctgggttctcgagcatcaatttccttttatgctgaaagttatgttatctagagtactcttgttcgatactg

SEQ ID NO: 3184 - DNA, 348 bp, Lilium asiatic
  modified_base (346)..(346): a, c, g, t, unknown, or other
agttgcagaacacacgaagcagttatacaagattgataaacagggtgctaacctgaggtttctttactggtgggaggacaaaactcaaggaaatcgtcagtgaagaaaactttaccagggtgctcgacggttccatgaattgatgggacaatatatgtgaagccttgtctcaattactgtgtggattgtgcttccgttttaataaagtcaaactcaaagtaccttgttccaagttttttcccagactcaaatttcagtgttctgcttgtgtttttgattgttacaattcagctgttgtattagaaattgctaagaattctcttggctgccatgattgtcagcgaanaa

SEQ ID NO: 3185 - DNA, 424 bp, Lilium asiatic
agcccctcgtctctctcgcgccctcgatgtcggccgcttccgctgctccgcggcccctccagacctcggggatgctctcgaaggagcagctcctccacctcttcgaccgcttctccttcctcgcctccgaacccggtacgaagaagcggatcgcagatgccgtccaggacaaacaggaggcagttgctgtaaccaccgccatccaagaagagatttttctggagatgggagttgatccaagatttggaattgcctgcttagggaaggtaaatgcagtttttgagaacgatagggacttgatgatccaattttacaaatttgttgcaaaggaagagatggctattgatgaggcagagctcgaaccagatgagttcgcagaaaaagtgcatatgcagacgaaacttcaagaacagcaactggagat

SEQ ID NO: 3186 - DNA, 451 bp, Lilium asiatic
ggcaagggatgctaatgctaatatgaatgactacgataacaatgtaattcctgatgatggggctgatgcccgaggggatgtccgctctgggagcggcggtggagattgcgaagggagtgatgagacaccaatgccaattaatcaatgtgaagtgaacgatgatgtgaacaatgaaacaacaaccatgatttgcgagtgaatgagtgcttttggtctaggtgcaggttctgacaatctcggaggcgctgacaatctaggttgttgttctagcaggcgcaggtgctggcaagctcggtggttccagtgcatctgaaaacccagaactgaagttcgctttcttctattccttttgctttcgtaaatgcagtagtttgcagtaatagagattgtactattgttctgttttagttagaacatgtgcatacatgtggctctgaattatataatttct

SEQ ID NO: 3187 - DNA, 385 bp, Lilium asiatic
cggacgcgtgggaaaatttacccccctcccccatggatgcaagcatccgcgggggagcaacaaaccccgaacgccgaactatgcatgcaccctgacacgtgcttggcactagcgggctgagccaggctggacgcaccgcatccgaatatgtgcccggtatgccagcgttccggacccgaccgaccactggcccgacacatgcccgaccagccacaattctcgtgctcccatttgcctaatagaatcggccacatttatttgttttgttttttcctcaagcctgcatttaatgttagatatttgtttgtcccccccccccccccctatttttctatatgtaggagggcaaagggatatttctcctctcggattttctcaattcaaa

SEQ ID NO: 3188 - DNA, 427 bp, Lilium asiatic
  modified_base (35)..(35): a, c, g, t, unknown, or other
  modified_base (79)..(80): a, c, g, t, unknown, or other
aaaaaccgggccgacccacgcgtacgctcccttcnaccagataaacagactttttgttttctcgcttgaactaaaatcnntcggccgcctatttattacagagggcaaacctctctaaactacctttttgttggtggatagactcccacaaagcccgctactaactcttcatctgctgacaatgctgggactgtttataattccttcggtgctccagctcctctttacaacggcaagcacgttcctgctttcatacaaggaaacacatcaaggaatgcaaacaactactttatagctcatggccataatacttgcaactttctaacacatcgtccttccaccaaatttcattctgaacctcttattggttcctcccttgactactcttttttttgccgtaacaacttattttattactattcttttt

SEQ ID NO: 3189 - DNA, 422 bp, Lilium asiatic
cccacgcgtccgatggagatcactaatgtctcggagtatgaagccatcgcgaagcagaagctgccaaagatggtgtatgactactacgcatcaggggcagaggatgagtggactctcaaggagaaccgagaggccttttcgaggattctgtttcgcccccgtgtactcattgatgtaagtaatattgatatgaccaccactgtcctgggtttcaagatatcaatgccgataatgattgctcccactgctatgcagaaaatggctcacccagaaggggagtatgcgacagcaagggcatcatcagcagctggaactattatgactctgtcatcgtgggctacttctagtgtcgaagaggttgcctcaacagggaccagaattcgcttcttccaactctatgtttacaaggacaggagtgtagt

SEQ ID NO: 3190 - DNA, 239 bp, Lilium asiatic
catgcgtgatctttacaggttggttcttgtcgatacaccattggctccctacttcgcaagagtgcatcacaatcagaggatctcgatgacatgaacattgaaattatgaggaatactctgtacaaggcttatctggaggatttctataaattttgcaagaaactaggtggagcaactgctgaaataatgtctgaccttctttcttttgaagctgatagaagagctgtcaatatcaccat

SEQ ID NO: 3191 - DNA, 452 bp, Lilium asiatic
gcgtgcggtcgacgagtataaacatatcttgtgccaagtcaccgagccattgtctacctttttggagcggtggcgtattgtcacatgatggataatgttgtcctcattgtcactggcaccttgcatgagagagatgtccacgaactactagagaaatgccatcctttggggatgtttgatagtatcgcaagtcttgcagtggcccagaacatgcgtgatctttacaggttggttcttgtcgatacaccattggctccctacttcgcagagtgcatcacatcagaggatctcgatgacatgaacattgaaattatgaggaatactctgtacaaggcttatctggaggatttctataaattttgcaagaaactaagtggagcaactgctgaaataatgtctgaccttctttcttttgaagctgataaaaaagctgtcaatatcaccataaacag

SEQ ID NO: 3192 - DNA, 234 bp, Lilium asiatic
ggacttgatcctattcatacctcgtcggggggggtttccacattgggctggcaacattaaaatttttggcacttacaacattaaagatttgccagattccttggttggtctgaatcattttggtggtcacattgctttacacttataccaacttacattgcaaaacaaccttcaaagctttgaagaaagattggttaaatattaatggctgacaccttgacctctggttacctt

SEQ ID NO: 3193 - DNA, 409 bp, Lilium asiatic
caatgacccccaatctctttctcctacgaggtttgctgctacctttatttttggtaagagccctttgataagttgtagttctcattcgcatatcatagagaacaagaatccacaaccattttcggggtttaccgcttcttctctcttcgctgagagcccttcaaacagttacagtttctttgacaactttgacgatctatttttgccaaagactacttctgatactgagcctgtaacaacaccaatcgatctagatgttcctggttccgagcttgtattcagagatattggaactgtttcaacagccgttgaacaagatatgcctggctgagcttgtattcagagaaactgttcctgtttcaccacccggtgaaccagatatgttgcatcttgtttcaacaaccggcga

SEQ ID NO: 3194 - DNA, 433 bp, Lilium asiatic
  modified_base (5)..(5): a, c, g, t, unknown, or other
  modified_base (11)..(11): a, c, g, t, unknown, or other
  modified_base (41)..(41): a, c, g, t, unknown, or other
aattnaagaancgacccgcgcgtacgcaaagaccggcaatntatttcttctacaaatttttttgctatctatattctaacactcactccccgcctaattataaagtgtgattggcatatattaaaaaacaacaatccacaatcattttcaatgttaaccccttcttatatattattcagagcccttcaaacacatacactttctttgacaactttgactatctatttttgacaaagactacttctaatactgaaactttaacaacaccaatccatctacatgttactatttacgaccttctattcaaagatcttgtaactatttcaacatccgatgaacaacatatacctgactgaacttgtattcagagaaactgttcctgtttcaccacccggtgaaccatatatgttgcatcttgtttcaacaactcgcc

SEQ ID NO: 3195 - DNA, 441 bp, Lilium asiatic
  modified_base (345)..(345): a, c, g, t, unknown, or other
catccctcttgagcatcttcaggatattatggtagttgtcctggctgatcgcaagcccaggaacatgcgtggggttaagtccaatggaatgctgatggctgcttctgatgtatctcatgagaatgttgaacttctattacctcctgaaggttcaattactggtgaaagaatctggtttggtgcagacgaggaaaaagaaaaacaaccagatcccgctccacctaatcaggttcaaaagaaaaagatatgggagtccatccaacctcacttgaagactacagattcctgcattgctgttctgggccaccatcctatgcggacttcggctggggcgggagcatgcanatccttgaagaatgcaaacatttcctgattcagatatgctagcaaaatgatgccaacttgctttcagtgatatatgctcaacttttaagtgattag

SEQ ID NO: 3196 - DNA, 448 bp, Lilium asiatic
gcgaacggtcgtccattacatcccttttgaccattttttcgatatcatggtacttatcctgcctccgcccattttcaaaacatgcgggggcttaaatccaatgtaatgctgatggctgcttctcatgtatctcatgagaatgttgtacttctattacctcctgaaggttcaattactgatgaaagaatctgctttcgtgcatactaagaaaaagaaaaacatccacatccctcttcacctaatcaccttcaaatcaaaaatatatggaattccatccatcctcacttgaagactacagattcctgcattgctgttctgggccaccatcctatgctgaccttcgctatgtcggtaacatgcaaatccttgaagaatgcaaacatttcctgattcatatatgctaccaaaatgatgccaacttgctttcatgatatattctcaactttta

SEQ ID NO: 3197 - DNA, 406 bp, Lilium asiatic
  modified_base (398)..(401): a, c, g, t, unknown, or other
gatctggtaaatgagatcagacgccaaagatgttcgtacctacgtttccggttgtgtggaaggggtgatccgtcaggcatgcgttttctattcatacatggttgaagacaaggcacccggtggactttcgtatgttgagttccttgtacatatacatcgacaaatacaaactaaaatggcgtgagtgtcctgcatggtccgacaccatatttttgtgagattcggttagtggagcagcatcgagtttggagttccagcaagtaacttatttactgatagagagattttaccgagtgttgttgctattattgtcgagactgttgagtagatgagaagtgaaattgttatttaacgcttgcactttaccgatagtaataattataaaatgttgcttcccnnnnaaaaa

SEQ ID NO: 3198 - DNA, 402 bp, Lilium asiatic
  modified_base (365)..(365): a, c, g, t, unknown, or other
cccacgcgtccgaaataaagtagttgcctgtactgggacaatgtacatatctttagcttggagttgatagagttaagcggcgagaaggctcagactgtggacacacctgatgcctcccccctgcaaagaagataaaatgcctgtacaagtctgtatggataagaaactttagacggaatatgcaagtagggatatgtttagcgtggctgtacaaatgtcgcgacggcgtcggagagctgttgcttgttttcagatgaggctccagtctttcttgttgttaactatgaggattatttattggtcttttgggataaatgtttttgtgtttacccaagtcccttgtgtgagggttggcttgtatgtanggtaattatgtattggtactttttactttaatgatat

SEQ ID NO: 3199 - DNA, 429 bp, Lilium asiatic
cgacctccggccagccatggcggctgcgcaacctccccatcctcattaaggtccacaaaatgcgcacgatacttcacaaattctttcccccttctaccctcatccctttcccctatcaccatcactaattttccgctctatacccctaatttcatctcacatctgggttttgaattttgaaatcacatgcatcccacctctgcaaccaccctagcgatgtatccagaatactctagatgtgttcgtgcgagggtaagaacgtagaattgtgtggattttttaggttcaatggcctataaattgaaggcaaatccagaggggagaagaagtctttagggagaagagaacttgagaaaggaggcttgacgaccctttgatttggaatttgcaagttccccggagcaagtttgcagttattcttctttcaat

SEQ ID NO: 3200 - DNA, 365 bp, Lilium asiatic
ctggatccttggaagattatgttcaccggattggccgaacaggccgggctggggccaaggggacggcatataccttcttcactgcagcgaatgcaaggtttgcgaaggatctcatcaaaatactagaagaagctggacagaaagtcagctctgaattggctacaatgggcaaaggttcctaccctcctccaggccctggtggttttcgtgatcgtgggaggggttttggcggtggacgttcgtggaactgatttcatggtgggatggatgtctttgttctgcaaaagttaaaggctctgttggttttaagcggtgagagtttggggagccgattttgtgttggcatgtcgtcctgcaacattgga

SEQ ID NO: 3201 - DNA, 271 bp, Lilium asiatic
ggaagccatgcatgaatctgaagatcgatattcattgaaagccatataaactaaggctgtggacgagatccacggtaagtaactcctatttttatacaaaggaaacaccatataaaaagtacacaattagcatgtctccgaggacctcctgaacgtcatgaacacaggttccacctgactatttgccttgagcctgctactggatcatctttcctatgctttccaacctggcggtgaatttaaagatgcaccccatgctttgaagaaagca

SEQ ID NO: 3202 - DNA, 293 bp, Lilium asiatic
gcatgatcagataatttagctactgtggagttgtaaatgacagcgaatgttttccatgggggctctggttagctttgttatctaatgggccttttggtgtgtgactgttggatgttttgcgttagactgttggaccatttggtttattgactgttggatcttgtttgccttcaactgaatattctggaaaagtggttctttgttggtaaaaaaaaaattaaattaaaagtctttaaaaagatacaaattaattgtctttaataaattttgtttaaaaaaggaacttctgattt

SEQ ID NO: 3203 - DNA, 357 bp, Lilium asiatic
cggacgcgtggggttcataaatgctctagatttgcgtctcgattctaggtattgcgttttggtttgctgtcgtatttttggtttgatgaagtattgttgttttttggggagaggcatgggccttgcacattctgttgataatttgtgactcttacagctcttcttttagtgcacataatatgtcactaaatattgatgatgaatggaaatagagtgatccatggcggcgtcctttacaaagtaaaataatgtaaattgatgttggtgagtttgtaattaaagatccttgaaatgtgtaaaggtctttgttagtaagagattttgttgaaaaaaaaggggtggccgctttaaaggatc

SEQ ID NO: 3204 - DNA, 220 bp, Lilium asiatic
gacccacacgtacgattagcatacgaagacatagctttttcatttagtaccctgaatcttcaacagaagtcacgctcatataacgcctgggaagggcaaaagcattcacgtatttccctgctaaagaccatagaatacaactgtaatacgtcttaatcttggacatatcagaagcaagaaccgaagtaggattaacctgcatatccatcataatactaac

SEQ ID NO: 3205 - DNA, 443 bp, Lilium asiatic
cagcagccgagagaggagagagcagcaatgtgtgcagcgcctgacctaccggaagcgccacagctatgccaccaagtcgaatcagacaagggtcgtcaagaccccaggtgggaagctggtgtaccagaacactaacaagagggctagcggaccgaagtgtccggtgactgggaagaggattcaggggattcctcacctgaggcctactcagtacaagaggtctaggttggctaggaatcggaggactgtgaatcgtgcttatggaggggtgctctctggcagtgctgtgagggaaaggattattcgtgcttttcttctcgaggagcagaagattgtgaagaaagtcttgaagatccagaagactaaagagaagaccaccaaaagttaaatatgagagttgaagctgaatgtttattttttttctagctcaaagaggatttttt

SEQ ID NO: 3206 - DNA, 148 bp, Lilium asiatic
accgacgcgtacgcagcggccgagagaggatagagcttttacgtttcaccgccggacctaccagaagcgcccagttataccaccaaggcgaatgggacaagggtcgtcaagaccccaattgtgaagctgaagtaccaaaacactaaca

SEQ ID NO: 3207 - DNA, 265 bp, Lilium asiatic
tccaccgacggcgaaaaggaaaaatggtgtttgtacgacaggtcaaacgcgtccgattgtgggttcattgaacgagactctgctacaatttacccaagtgaaaacattattataacacctcgctgatacttatcgaggaggtgaacactaaagcggatgagactttgtactgtaaaaagcgcttggcatatatatacagcgctaatgtgaataagaacttctggcattataaatgtattaaatgaaatggacctcttattattaa

SEQ ID NO: 3208 - DNA, 434 bp, Lilium asiatic
ccagtttcccgtaggccgcgttggccgctacctcaaaatgggccgctatgcaaagcgtgtaggctccggagctccagtctaccttgccggcgtgctcgagtaccttgctgctgaggtgctggagctggcaggcaatgctgccaaggacaacaagaagtctcggatcatcccgaggcacgtctgccttgctgtcaggaacgaccaggagctgggcaagctgctcgctggagtcaccatctcccatggcggtgtcatccccaacatcaacccggtcctgctccccaagaagactcttgagaagggtgattctgctgcaacaaaatctcccaagaagactcccaagtctcccaagaaagccaccaagacgccaaagaaagcttaaagggcgtgttgtaaggtccagtaagtggtgaatttgaattagagctttttga

SEQ ID NO: 3209 - DNA, 300 bp, Lilium asiatic
ggcttttctttttgtagtcttgacattatgatgtacttaccaggcctgtatcgaaaattggatgcattggcaaagattggggcgcaaccatatcaaaacgatcttatggatcataactttctttcagtccatatacccgctataaaaccttctccttgcatcaatctttgaacaaactattccatctcaacgaaaaataatatcaccggcttttcttcccccataaaacataaaatggctttaaaatgatcatgaacatatatattatctttcacatggtaactattaaatcccctttta

SEQ ID NO: 3210 - DNA, 462 bp, Lilium asiatic
gtaaagtccgggtcaggaagagccgaagacgtcaattcagccaaaatcccgagttgcttcaactcttctccaccgccaccaccgatcatggcggcggagtctccgattgtcgatcgcaaagttgtgattcatctgagggcaacgggcgatgctcccattctcaaacaagccaagttcaagatcgctgggaccgacagattttcaaaagtcattgaatttcttcgccgacaacttcatcgggacacattgtttgtctatgtcaacagtgcattttcaccaaatcctgacgaattggtttctgatctctataataactttggtttcgacggaaagctggtagtaaactatgcctcctcaatggcctggggctaaaatcgacggcaccaaatattttcaggttttatccaactattttcagcttctattgttgggacttacacaagatggacggtttgagcatgt

SEQ ID NO: 3211 - DNA, 174 bp, Lilium asiatic
tctattaccttgctgctgaggtgttggatctggcatgcaatgctgccaatgacaacaagaattctcgcatcatcccgaggcacgttctgccttgctgtcatgaacgaccattaagctggtcaagctgctcgcttgagtcaccattttccattgccttgtcatccccaacatcaa

SEQ ID NO: 3212 - DNA, 454 bp, Lilium asiatic
aacaagcctcctccgcccaactcttcaacggtctcccccttcgccctccccagatttctgctggcgccctcagggagcggatcggcggctgggactcatttgatctcgatcgcaccgatcacggatcgtcgccgccatggctgctccacctgctagggcgcgggccgactacgattacctcataaagctgctgctgatcggcgacagcggtgttggtaagagttgccttctgttgcgattctctgatggttccttcaccacgagcttcattaccaccatcggcattgattttaagatcagaacaattgagcttgatgccaaacggatcaaactgcaaatttgggacacagctggccaagaacgctttcgaactatcaccaccgcatactatcgaagtgctatgggcattttgcttgtgtatgatgttaccgacgagtcatcttttaataacata

SEQ ID NO: 3213 - DNA, 100 bp, Lilium asiatic
acgcttgattgaggaatatctgcttatgtttcattaattgatagcatcactttttgattgagcggtactgattaatgatcaagcattatgaatttatgtt

SEQ ID NO: 3214 - DNA, 442 bp, Lilium asiatic
gtcgaacagtttcatgaagctcctgtcctatgtgttatagtgatttacttcaatgctgatggttcggttcgagctcattgttctttggagtcgaagtcgaaggaagttttatcatgcagtagttcgagctacacctggtgtggaaccgtttttagattttgtatatgcgttttgtacaagctatcagtacttaatgttgtaagctttctgtatttttgttgagttgtatattagttaacttatgaattttgacttataatgatttattgtgtttcctttgttttttattatttttcttatttttcttttttttttttatgtctgatatttttttttttacttttttttttattattttttttatatatttttctttttttctttttctgttttatttgtctttttttttgttattttttttttctttttttttttttttttt

SEQ ID NO: 3215 - DNA, 350 bp, Lilium asiatic
  modified_base (76)..(76): a, c, g, t, unknown, or other
  modified_base (81)..(81): a, c, g, t, unknown, or other
  modified_base (118)..(118): a, c, g, t, unknown, or other
gaaaaaagggccgcccacgcgaacgcacgcatccggataccttggagtttactttttttacaaaagtttctcatcnggccngctgtatattttcaaaaaatctggggcgaacacaaangattttttttaaatttgtgcatcttagccagcgatgtatagctttcgctgatagattgttcaaccaatttgaaatactgtactgactgatttttggagggaagtgtaaatattagtgtgtgatttcaccggcaaatgtttttatgtgagacaatcatcgaggagaagaacaaattgttcatacattctcctcataatgattaccatgtaagatataaacttttttttattta

SEQ ID NO: 3216 - DNA, 357 bp, Lilium asiatic
  modified_base (104)..(104): a, c, g, t, unknown, or other
tataatcaccttttcatttccccacaaaaataatgcaagctgtagcctttcttaaagggaatgttcccaactcaactttactcactatccacttcataatccanaaaaaactaattatcatatatccaattctaaatctcactcatatctttcaacactttctattcaaattaaaataatctctcctattcacattttacttttctaacctacattatctttatctaattttattcaaacttcaacattattattctccaactcatatttattcatttttaatttcaccatatacactaaattttattctaacacattaatcaaatataatcaaattaacatacttatatatattat

SEQ ID NO: 3217 - DNA, 392 bp, Lilium asiatic
  modified_base (5)..(6): a, c, g, t, unknown, or other
  modified_base (124)..(124): a, c, g, t, unknown, or other
ccggnntgaaaaaagggccgaccgcacgcgtccgctggcaagaccattactctggaggtggagatttcatatacaatcgataatgtgaaagctgggatccattacaaggaggggatgcccccanaccagcagaggctcatttttgctgggaagcagctggaggacggtcgtacgcttgctgactacaacatccagaagcaatcaacccttcatttggtgctccgcctccgtggtggccagtaagctgtctgcattttagttatgttcatggtttcattcatcagtagtttgttatcacttctggatgtgtgttggttccatttaaactcatacagttttagtactatttggccgtgaatctgtgtttgaataatatgaggatctgtttgaat

SEQ ID NO: 3218 - DNA, 347 bp, Lilium asiatic
gttttgagacaccatttccggccgcccatctcgatccgatggctgtcttctccgatctccacaccgaggccggcctcaaaaccctagacgagttcctctccggcaaaaccttcatctccggagatgagattaccaaggatgatgtgaaggtttatgcggcagtgtctttgcccggtgaggggttctctaatgtttctcgttggtatgagaccgtctcttcagctcttgcagtgaggtttcctggcaaggctgctggagtgaatattggtggacaagttccaccgtcggaacctgcaccttcgtctgaggctacaaaggtggtggcccgagaagatgatgatgatttg

SEQ ID NO: 3219 - DNA, 443 bp, Lilium asiatic
  modified_base (349)..(349): a, c, g, t, unknown, or other
ctagggtttcatctgcacgcgaggaaacatgctggtctaccaagatctgatctccaatgatgagctcctctctgattcatttccctacactgagattgaaaatggtatgctgtgggaggtggaagggaagtgggttgtccaaggagccctcaatgtagatattggtgcaaacccctcagctgaaggtggtgaagatgatgaaggggttgatgaccaggccgtaaaggtggttgatattgttgacaccttccggcttcaggagcaacctgctttcgacaagaagcagtttatggcatacatgaagcggtatgtcaagcagttgacgcctaaacttgatgccgagcagcangtgctatttaagaagcacattgaaggggccattaagtttttgctttcgaaagctagtgatctgcaatttttgtgggttaaagcatgcaagatga

SEQ ID NO: 3220 - DNA, 310 bp, Lilium asiatic
tgtcggtggtgccggtgaggcgtgggtactgtgggaacaagattgggaagccgcatactgggccgtgtaaggtgactggtaagtgtggatctgtgacagtgaggatggttccggcgccgcggagggcggtgattgtggctgccagggtgccgaagaaggtgctccagtttgctggaattgaagacgtgtttacgtcttctcgtggatctactaagacccttggtaactttgtgaaggctacctttgattgccttatgaagacttatgtgttcttgactcctgatctttggaaggagactcgctttgtcag

SEQ ID NO: 3221 - DNA, 440 bp, Lilium asiatic
gtggggacatgttacaggtttagttccatcaatcagaaccgcgaggaaaccctagaagccgataccagaggccttgcggttcttcgtcaaactccaatccatgggcgaagaacaggagcagcagagggagaaccggctcggagggacgccgccgggaccgatttcgcacgcccagtttctttcctggaagcgccagaaggatgctgaagcatcagccaatagagctgaagcagctcgcaagcgtgcagaagatatagctgcaggagtaataccgatgaatggtcgtgagcttttcctgcgagaaccatgggtattcgataatgctcagtactgagaactcatgatttctgaccggcttctactttctgtgctcctgtatagtttcgtctgtagcgttgtactatatccaatggatactgcaaagttcatggataactgtc

SEQ ID NO: 3222 - DNA, 443 bp, Lilium asiatic
tttttggccaatattaaggagctcaatgcctatagacaatcacgcgaggaaactttagagaaggctggagaaatttttggtaccgaaaacaaggatctcttcctatcctttcaaggcttgcttagtcgcaatttatgttgagaagtcaaatttattcatggagatgatgtgtgagtaaagttgtgctagccatactctccactgagtgtgtgtttacgccgaacttgactgtatctccgcatgtagatacttggactgaactcacaggtcatatttaaatagcattaacttaattagcagtgtacagatgctgttcatgaattgcatacagtgggagtatgctttgtgagttctttggaggcattgacacatcatcgattgcgcgttcaaaattgtagattctatcaatattcatttccaaattcattcagtaggtccatgtt

SEQ ID NO: 3223 - DNA, 450 bp, Lilium asiatic
cttgaacgacttggtggctggtttgactcttggtggaaatacacaagagaacaagcaaccgggagcctccggtggaacattcactggaaccacaatcttagatgggagtagccaactaagacagctacctacaaatggagctctgaatggtcgtcttggttcaaataccgtataccctttggctcctatgcagtataatctgccatcaaacatcatgttaaatcaagcattttctacccagcctatgaactatggtgcaatgagtgcttttattgcccaacagcagttactattacagaattttggcaatctgaatggtggatttgggcattctactgggtttgccaatgaaagatgtcagtcgccgctcattcctgacattttccacctattcaccaaataagtacaaagccagggaccaatgatgaccagcaccaaaaaggatgacac

SEQ ID NO: 3224 - DNA, 453 bp, Lilium asiatic
caaccaacctcgattggtacaagggtccaacccttcttgaggctcttgaccagatctctgagcctaagagaccttctgacaagcccctccgtctcccacttcaggatgtctataagattggtggcattggcactgtgcctgttgggcgtgttgagactggtatcatcaagcctggcatggttgttacctttggccctaccgggctgacaactgaagttaagtctgttgagatgcaccatgaggctcttcttgaggctttacctggtgacaatgttggctttaatgtcaagaatgttgctgttaaggatctcaagcgtgggtttgttgcctcgaactcgaaggatgatcctgcccgtgaggctggtaatttcactgctcaagttattatcatgaaccacccgggacagattggtaatggttatgcccctgtcctagactgccacacatcacaca

SEQ ID NO: 3225 - DNA, 383 bp, Lilium asiatic
gccgagatcccaccctcctctcccggcggcttcgatttccaaccctcatcagatacaatgggggtcattgctgcctacctcctggctttacttggtggaaactctagcccgtcaagcaaggatatcaagcatattcttggttcagttggtgctgatgctgaagatgagcggattgagtttttgcttgctgaagttaaaggcaaggatataactgagttgattgcttctggaagagagaaatttgcatctgttccatctggtggtggtggtgtggctgttgcaatgtcggcaggtggtggtggtgcagctggccctgcagcagcaactgctgagccgaagaatgaagagaacgtggaagaaaaagaagaatctgatgatgatat

SEQ ID NO: 3226 - DNA, 339 bp, Lilium asiatic
gtttctgcttccgaagcttagtgatctgcattttattttgggtgagagcatgcacgatgacggtagcgcttgtgtttgcttatggcaaggaatgtgctactgatccaacctgtttgtacttcgcgtacggattgaatgagatcaagtgctagacttgaaaaatggcatcatatgggaaaaatagtttagtttactagtttgcttgttgtgctctatgtatgttgtgatattattcttggtttttattcgttacttttgtacttggttatatattaacttttttgtactgcttatattaatttttatttaaaaatttggttttaatattattttttttta

SEQ ID NO: 3227 - DNA, 437 bp, Lilium asiatic
cccacgcgtccggtcaaccatgtactcgttggagtgcttcttttcgtagctattttcatagtgctcgctagattctcttctcgagggaagccgattgctgaggtgaaggtgagagccccgccaccgatgaacaccgtggagcagttggtagctgtccagaatgcaatatcccaagtggaggaactcgtgcagattgggaatattgttctcctgaagttgcgagctttattgatggctgtttcttctcaggcatcatatatagttattattgttgcctggtctgatggcacttctgggtgctttcctacttgcttatctgtttttcctttggattttcttggattcttctattgtgttttttctttcatgattttttgttctttagtttatttattttttggtttatttttatttggtttttcatttttttttttctt

SEQ ID NO: 3228 - DNA, 220 bp, Lilium asiatic
cgccgccgccgccgcagctagccgggccgtttagtgaagatggtgaagggcaggcaaggcgaacgcgtcagattgtatgttcgcggcacgattctcggctacaagagatcgaagtcgaatcagtacgagaacacctcgctgatgcagattgagggggtgaatatgaaggaggaggttgcgtggtactgcgggaagaggctgtcgtacatttacagggcga

SEQ ID NO: 3229 - DNA, 406 bp, Lilium asiatic
tgccattgatgcggcgattcagaggcttgactacaatcagcttgcggaggctgatgagttggatgacaagatgaaggagctcgagagtatctgcaatcctatcattgctaagatgtatcagggttctggtggtgtgcctggtggtatggatgaggatgatgagggtcctgctcctagcggcagcggtgctggtcctaatattgaggaggtcgactaacgtgagagaagttggcatttatcttgtttggttttattaaattaaatgatctggtgaactgcttggatatctggcctgattatatgttggagggcctgagttttggttgactttagttggtctttgggatctatttatttgttaactagcagacttttggtatattaatgcgatatttatgttttgcga

SEQ ID NO: 3230 - DNA, 286 bp, Lilium asiatic
cgcgtgcgcatcacatcggtgaaggagcggactggatttagcctttacgcaatctcgaagtttgttgaagacaagcacaaagctcatctgccggcgaacttcaagaagctcctcctcgtccagctgaggaaactcactgctgctggcaaactaacgaagctcaagaactcctataaaatatcctctgtcaagcccaacaccgtctccaagtccaagtctgccgtgacaaagccaaagtcagttactgcaaagccaaaatcggcagctgggaagccgaagaagactg

SEQ ID NO: 3231 - DNA, 411 bp, Lilium asiatic
ggccgaccgacgcgtacgccattcatgttcacatcatattacggttcatacactcacggaattcacttttacgatccttgctttccactttcctcgagccctgccaatgtataaatatatataagtcaaaaagagtggtattaaccacggatgacgataagggaataaaacaatagcctttccacatagaatggttcaaactgaaagaaagatttgctaattcttaatgaaggggttattcgttaaatgcttacccttcagaaatataggactaaacacaagcattaaactcttgaaatataactcactattttcctaactttctagataagaataatttgactcaactcttataccaaagacatttttatcccattaacatacatataatctttaattcttacaattatt

SEQ ID NO: 3232 - DNA, 275 bp, Lilium asiatic
tatgataaggggcgtctccttactatctaagacgctttcttcttgccaacaatgtcctataataacattcgattagctttaacatttcttcttaccccctatccattatatctacttaaaaaaaaaaaaaaaataacttcccatttataacatccaatcttacttacccttgcattctacatcataactcttctatattgtcaccctaaatacaattcactttccctccttttacaacctctatgactagtcaaaaccctcttcctttaccccaa

SEQ ID NO: 3233 - DNA, 435 bp, Lilium asiatic
gaagggccatgtagtttatcctagaggctgccattctccatgtaaggatagagtagtaggttgccagctacagacaatgaatacccttgaagaccaacaaggtttcgatgcttgatactgccaacagtctccagttcggtctcaaactccttcaggcattgcggatgagcatagagctttttgatggctactggattgcagttttttaacacacatttgtaaacggtgctcgaagcgccatacccaattatgtactgctcattcaaattttccgtcatcctcattatgtcttcatagacatgtagggccatgttcatgtgaaagataaccagtttcggtgagaaattattgacaggttttttggcagaaaacatagagaaagactggggattttgtgggctgcatgctggcactaaaatcattaacattatcaaa

SEQ ID NO: 3234 - DNA, 454 bp, Lilium asiatic
agctattcgtatagctaatgatacaaatgcatggctggctgcttatatattcactgcaagcattccccgttcttggcgtgtatctgaagcccttgaatatgggcttgtcggtgtgaatgaaggattaatatccactgaggtggcaccgtttggaggagttaaacagtcaggtcttggacgagaaggatccaaatacggaattgatgagtacttggagctgaaatatgtttgcatgggcaacataaacaaggcatgatagacgtggatgaaaagaactgctctgctggtgtaatacccttcaaaggtgtcatcgtggtaacagatccgaagaaagtcctgtggtgcaatgagaactcacgaataaaagttttccgaaagtttttcttttccttttccttccattccttgagcttcatactaagctaggaaatgccaagtgtaataaattaaatgc

SEQ ID NO: 3235 - DNA, 261 bp, Lilium asiatic
acgggttgaacgatcaaggaaagaatgaattattgaggatgttgtgaggaccatgttgggggaggtggtgggagactagggattgtggcatcgggtttaggaagtgatggagatgggcgctgctgcgaggaaagagattgagagtgaaattattaaatgtcggattgctagagccatagaggcctagcaatctggctttgataccaactgatgtataaccgatcagggggatcactctatatgctcggattgtaaagtttt

SEQ ID NO: 3236 - DNA, 112 bp, Lilium asiatic
tcatatgtctcttctatagctgtcgatcctaaattcacattcaactggcttctgtcgttttaacaacctgtcgtgtaccttgtggaaaacctcctggctgttactccaatct

SEQ ID NO: 3237 - DNA, 223 bp, Lilium asiatic
cttctgttcactttgtttcaatggagtctggtatgaaggctggtatggatggaacttccgggagccgagccatttctgctccggctccgcagttcactcactccctgctccgtgttgctgcctttcttgcgacgatggttgcagcgattgtgatggcagtggcaaagcagacggagactgtcagcgtcgtcatagctcccaccttgccgacgttgccgattcc

SEQ ID NO: 3238 - DNA, 303 bp, Lilium asiatic
cccacgcgtccgtttcttagaaggatgtctatatgtatcttttacaaggcttgtgttttgagagcttttgggcatcgctttaatcttttttgttttgatttcactgattcccttcaagaatctgaagcattgggtgtatatattttttaatctgtttgagaatgggatgttttcaataaaataaattttataatttatattttattatatattaataaatttaattttttattaatatttttaattttttttttttttttatattttattttattattttaattatttcttttttttattttt

SEQ ID NO: 3239 - DNA, 263 bp, Lilium asiatic
gatactagtatgtaatctgttgtccttgacatttttttaacttgcggattataaactcacatgcttgttgtatctggcatgtggttcgttcttatacattttctaagcttgaggattatctttcctgaattgtgtttaatataaaaaatataaatatataaaaataaaattattttatatataatatataatttttaataataaatcaataaatttttataattttataatattaaaacggtcggccgctttaataaatccaa

SEQ ID NO: 3240 - DNA, 436 bp, Lilium asiatic
gcattggcttttctccaccatggatgtttccctcagattgtacatagagacgtgaaagcaagcagtgtttatcttgattcagaattcgagcctcgactgtcagatttcgggttggcgaagattatgggaggtagtttagaggatgaggtgtcgtgggtgtctccgggctatactcccccggaattctcagagttggagaatgctgctgctactacgaaatctgatgtttatggatatggagttgtattgtttgagctcatcacggggaagaagccacttggcgatagttacccagaagagaaggagaccagtttggtcggttgggccagggcgttggtgaagaagaaccgggcctcgagagcggtccatccgaagattaggggaactggatcagagaaacagatggaggaagcacttaggattgcgtatctatgca

SEQ ID NO: 3241 - DNA, 408 bp, Lilium asiatic
cccacgcgtccgcccacgcgtccgcggacgcgtggggaagcgggatgttatcttctactcataatggtaacgcaatttcttcctcagtaaaagtgccgacttcctcttcaagaatgatggatagtgttggcatcagacactcagatgacagtgttgaagttcccgaagtttcaagacccatctctgccacatcttctcattctccccttcctggtgactcttttactaagcaaccaaggaagaactctccctctgaagaacatgaacggctaggtaaacgtagaaaggtggacactgatggaaaagatagtgatggtctggaagttcgtacattagataaagacagaaatgttgaatcacgcccaatggataaaactcttgtaccagatcatgataggaccgaaaatg

SEQ ID NO: 3242 - DNA, 297 bp, Lilium asiatic
ttaattccctacctcgcccttcaaaaaacacatcttcttcaaaaccctcaccggcaagaccatcaccctttatgtggaaagctcttacaccatctacaacatcaagggcaacatccacgacaacgaaggaataccccccgaccaccaacatcttattttttcctcaaaacaacttgaggacagccgcacccttgctgactacaacatctagaaagagagaactcttcacctctttctccatctacgcggtggcatgcacatcttccttaatacactcaccgccgagaccatcacccc

SEQ ID NO: 3243 - DNA, 204 bp, Lilium asiatic
gtctcccaaaaccggagatgccaacatctaacctgtatattatgatttagatagatatttgtagtcaattattctatattttccttgtaatagaaatatttttaactcaacataaaactattcatgtgatactggttaaattgaattcagttagtgcttagttttgtaacagaattgattttgtatcaaaaaaaaataattgac

SEQ ID NO: 3244 - DNA, 257 bp, Lilium asiatic
cttttttatcctgccttgaatttgtgtttgttagattgtttcctctagctttccttcactgcatttgcgaaaagaaaaaaaaaaggaaaaaaaaagaaaaaacaacaacattagagagagagagagagagcgaggtatttgggttttgaatgtcaattgttgttatgtatatagagagtgggattactttgtgtttattgaggaaaaagaaaaaaaaaaatataaaaaaaaataaaaaaaaaaaaaaatataataat

SEQ ID NO: 3245 - DNA, 454 bp, Lilium asiatic
cccacgcgtccgctctctccttcccctctgctgcaactcttcacctcccaatggccggagcttcatccaagtcctcaggtgcccctaaggcgcgcaagagggtggaggctgagacgtcctctctaaagcgcgccaagaacgggagtgccttcactcgatgtgatgaatgcaacaaggatgtccctgtggtgctcattgacatgcataattgtagccttgattccaagatcaagatgactcttgagtctcaagttgtggaaatggctgctgaggccaaaaaacagccttctactaagaagtctacttctactgttgaggccaaaaaagtgtcttctactaagaagtccaaggagaagagttctaaggggaagaaaactaaggatcctaatgcccccaagcgccctgcttcatcattctttctcttcatggatgactttaggaaggagtataagga

SEQ ID NO: 3246 - DNA, 210 bp, Lilium asiatic
accacgcgtccgctctctccttcctctcagttgcaactcttcacctcccaatgggggtaggtgtcatccaagtcctgaggtgcccctaaggcgcgcaagacggtggatgctgatacgtcctctctaaagcgcgctatgaactgtagtgccatcactcgatgtgatgtatgcaacaaggatgtccccgtgtttctcattgacatgcataat

SEQ ID NO: 3247 - DNA, 436 bp, Lilium asiatic
gcgtccgattgggcggtacctcaagaagggtcgatatgttcagcgtgttggttcaggagctcctgtctgccttgctgccgtccttgaggatcttgctgctgaggttcttgaattggcgggcaatgcggccagggacaataagaaaaatcgaattgtgcctcgacatgtgtgtttggcggtgagaaatgacgaggagcttgggaggttgttgggtggtgttaccattgcccatggcggagtcctccccaacatcaacccagtcttgctgccaaagaagaccggaaaggagggtacagagcccaagtcaccaaagaaagctaccaaatcttccaagaaggctttatagttgttgatttgattttggtcgcttgtatgtaatcccctagattacatgaacttggaattattaaatttgtctgccagtgttcttaagtgg

SEQ ID NO: 3248 - DNA, 435 bp, Lilium asiatic
  modified_base (407)..(407): a, c, g, t, unknown, or other
acggaccttcgccggcatgaaccaaatgagcagcagggtgtgaatggcggaggccgtggcggcggtgcagggacgccacgccaccaacgaacggaggacaaagctgcgcttcaaccgggccgccgagctggctgcggcggccggagctggcacggagcggcaggctggaagtggatatggtggcgataagcggcaggaggcggacgatttcgtccggagggccatgtacttgagctcgtgagcgccgagttaattaatatgattgatctcacgtgataatgctcggatttagggcggagctccggctaacccggatggaagatgtttacgatccgtatataacggaaattacctaaaatagtattatcgctttgggatacacaatagaaatgtactttcactctttngaatcaaataataaaagtgatttgttac

SEQ ID NO: 3249 - DNA, 396 bp, Lilium asiatic
aaaaaagggccgacggacgcgtacggagatcaccattggttgttcatgcatggtgtttttagaagaagggatgccaggcagaagtgtggatctataaagccctaagggcgagcgatgaaattccccaagtctcagacgaagaagttcaccatttctctgagcctccttcatccaggaactctgcttagtgacagagtcgagttcggggaagaaggagtatgtagtagtcgtattctgttagatgatatgtatttctttttatctgtttgagttgtaataagttagattttcattctctttctcgttataactttatatcttgtctgtaataatgatttatcggtctatttcttctgtactcaaaactttatttttaatacaagtgttggtattatt

SEQ ID NO: 3250 - DNA, 402 bp, Lilium asiatic
aaaaaccgggccgaccacgcgtacgacgtgggaagacagagactgctatggatgttttgtatgctctcaagcgacagggccgggcgtctgtactggttcggaggctgggcttcttctctggtatcctagtcttggaggtgctgttattgttagctgtgaatgttgttttctgctgtaagcttttgttacatcaccttctggtgtgaactgcacttaacttttagttggatgattaattcttctaaaaaaaaaaaaaaatataaataaaaaaaaaatattaatatatttaaaaatcaataaaaaataatttatactaataattttggtggcccgtttaaaaaaaccaattttactaacccttgcattcaacataatagcttttttattgtggcacctaaatta

SEQ ID NO: 3251 - DNA, 423 bp, Lilium asiatic
aaaaaaagggccgaccgcacgcgtacgggacaacctggccatggtgtccgcggtgggttgtaccacccagcccagaatctggctgcggcgggagttcatacactactggggcaatctaaagctatggcctgagcagatgagggtccggccggtccttaccagcagccacagcgtgcacagatgaattgggctaataattatagaagataaatagcatctctgttagcaagaaacttggaagatgttttggagtacgaatgtcccgagaatagcggcctgatgactagtgtatatacattacaaggatggcctaactgggaggaaaggatcacagctgaagttcaactgttactgatatttgaccctcttatgtttctgaagctagactagatgctgctatttgtcaattcccattttcttctt

SEQ ID NO: 3252 - DNA, 114 bp, Lilium asiatic
cccacgcatccgcagacgcatgggaaaaaatttaaattttaaaaaaaaaaaacaaaacaaaagaaaaatgaaaaaaaaaaaaagaacatacaaatatacaaaaaacaacaacat

SEQ ID NO: 3253 - DNA, 453 bp, Lilium asiatic
cagtgctttgaactgcctcttggtacgattgtggttccttgatgttatgcaccacagaaaggaaagcttgaaacactggtgtgtaagtgacaactgacgtgaaacccaagcactccgtctttcgacgaatgcgcccagagtggcgtggagctgcaggatcaggcaaaggaggcactgacgggccatgactgcattagcatgacgtggagctgcaggattagacaaagtatgcactgatggaccatgaactggcttggatggttatgtattagcatgatacttgcgcttcaggtgacgatagaaaaagtaaggcgtagcaggaggagctcgggcaggaagatacgaccgaagaggctgagcaaccgaagtaggggaaggtggtgtgacaagaggagctggggctggagtagacgactgactaggctgagtaaccggagcatgggaaagtggtgc

SEQ ID NO: 3254 - DNA, 457 bp, Lilium asiatic
cgttcgacccacacgtacgctctgtcatccgcatccaaatctcgtagacgtatcaagcacgcgaccattgcctgggaaggtggcacttgactgatcgccgcttcaaccacctccgacgctaagtacatggacacgaagcgcccaacctgccgatccttacgctctgggctaaaatgtccgctgtggagcatccacacgcagatgaagtctagtgatcgctgctaacggacgcgtaagtgcgacggtgcgcagtgtactcggtcacgatcctggagtattttacagtagaagttctcgagctcgcctcgaacgctatcaaagatctaaccgagaagctcataactccatctaatctgcagttggcgatccgttcgcataacgtgctctatactctgatcaaaactacttttaccgtggatggcgtgataccgcacattcataagtgttatagcaacaa

SEQ ID NO: 3255 - DNA, 340 bp, Lilium asiatic
cgacccacgcgtacgctttaccatccactttcgccatcctccgttttccaaccacgacaaggagccgccggtctggtgcacctacaccgacattcaaggtatgtatttcacctgtcgtgttccctattttctaacaaagtttaattcttgtgtgtagagaacaagatgatggagaaggttaagatgttgggcaagatgggtatagatcgagacatgaatgaagaagaagatggctttggtaaggattttaattccaaggctgtgtcggcgaagttggcacaagctattgaagatgcatgggactagagaggcgaataatgttggcattgacaatgactca

SEQ ID NO: 3256 - DNA, 397 bp, Lilium asiatic
ctcttctcaaggccaatgatgacaaccaatgtgtctacaccctgttcgtccgcaccggctggatcttgaaagctggcacggactccatcatcagcatcgaccttttcgaccgggatggcaacggcatcggaatccccaacctggatgcgtggggcgggttgatgggagctgattacaactacttcgagaggggcaatctcgacatcttcagcggccggggaccctgcctgtctttgacgccatgctccatcaatgtcaccttcgacggcaccggggcataccatggttggtactgcaactacatcgaactcacagtgacgggtccgcatctgccttgtgatcagcagctgtttacgattgatcagtggctagctactgatgcgtcgccatacaagct

SEQ ID NO: 3257 - DNA, 459 bp, Lilium asiatic
  modified_base (56)..(56): a, c, g, t, unknown, or other
aaaaaccgggccgaccgacgcgtacgctctgggtttgagggtgataacatgattgngtgatccaacaacctcgactggtacaagggggccaccctccttgaggcccttgacttgatcaatgagccaaagaggcccacagacaagcccctccgccttcccctttaggatgtgtacaagattggaggcattggaactgtgccagtcggccgtgtggagactggtattgtgaagcctggtatggtagtgacttttgggcctactggtctgaccactgaagttaagtctgttgatatgcaccatgatgctctttttgaagccctccctggtgacaatgtgggatataatgtgaagaatgttgctgaaaaggatcttaatctgtggtttgttgcctcaaactccaatgatgatcctgccaaggatgttgccaacttcacttcctaagttattatcattaaccac

SEQ ID NO: 3258 - DNA, 275 bp, Lilium asiatic
aaaaaccgggccgacccacgcgtacgctttgtttataaaaacatataacttacctgttataattatattatgtcagcacactggacctgattattcaaaacttataaactcaccaatataaaaaacatcttatacatctaatattgatgtctttaacacttgaaaaaacacacccaaacttctaaaggttgaatcttgaatcacaatcatatacacacaacaacacttttccacccccaccaaaaactctattgattgccactcctcttgaaaga

SEQ ID NO: 3259 - DNA, 460 bp, Lilium asiatic
  modified_base (330)..(330): a, c, g, t, unknown, or other
gcaaaatctgatgacgaggggaaaccaagtgacaccgatccatcagccaaccccatgcaggttgatgattctgaaggaaaacctgatataaatgatatcacaatggaagaagctcaggcttcggagaagaaacaagaacccactgatgaggccagtgaggctaacatcgacttgaatctggggttgaaaggtcgcgatggagacattggaattgattcgaaatcagctgagcaggctgaaagcactggcgaggatggggaagtgagagctgcactgaattccgaagccgaaaataaaaggaagaggaaggacatagcgcctgaccttganatgaagatgtaggagatgaccgaggatctcgattttatttacattgttcaacttacttgatatccgtggatgtagtggacaatttattttggagactttatgaaagaagtattttggataaattataaaa

SEQ ID NO: 3260 - DNA, 332 bp, Lilium asiatic
cagatgctatgatagtcctagaaccatagtttaagctcatatgcatccatggatcgtcaagggccagcagatcatgaacaggagtcgtagtttatacccctaaaggcggatcagattgagcaatcaatgaagtttgcgtttagtgcatctaataacgagaccgaacatgaagtcgtgatcacaggattacgaatcgtcaaagttctggggttagcaaaatttgaggttataagagacctcaaacttgtaatatgacatattaccggaagcactaatgcctatgacagcagcatgtaaacataccctagaaagcattcattgattggtttaag

SEQ ID NO: 3261 - DNA, 437 bp, Lilium asiatic
ctctctcctccgcccccaaatcccccaaaggaatctagagtgagaaaatggccgggaaaggcggcaagggactgatcgccggcaagaccacctccgccgccaaggacaaggacaagaagcgccccacctcccgctcctcccgcgctgggctccagtttccggtggggaggatccacaggcagttgaagtcgcggatcgcggctaacggccgcgtaggtgcgacggcggcggtgtactcggcggcgattctggagtatctgacggctgacgtgctggagctggcggggaacgcgagcaaggatctaaaggtgaagcgcataacgccaaggcatctgcagctggcgatccgtggggatgaagagctggatacgctgatcaaggggactattgctgggggtggtgtgattccgcacatccataagtctctgatcaacaaa

SEQ ID NO: 3262 - DNA, 222 bp, Lilium asiatic
ccgggctcgactccacgcgtcacgctctcgtcactccgccacccaaatctctccaaagtttatctagagtcgagaaaatgtgccgggaaaggcggcaagggactcgatcgccgggaagaccacctccgtcgtcaaggacaatgacaagaagcgccccaccttccgctcctcccgcgctgggctccagtttccggtggggaggatccacatgcagtttaagtc

SEQ ID NO: 3263 - DNA, 121 bp, Lilium asiatic
cccagccttcctccaacccatccttataaatttaacaaacaaaagaaaaaaaaacagggaaggggaaaaattacaaaaacgccaggaaaaccacctccaaacaacaaagacaaagacaaaa

SEQ ID NO: 3264 - DNA, 413 bp, Lilium asiatic
gtttcgggggaagaagatatctgatcagagtattgcggagaggttggagtggttttctgtggagctcgtcaaggagcaggagaggaggaagaagagcttggtaccgacagtggttgtcaagcaggcgatgtctcctagatcgtcgtcggtgacaatgtcgacagtcatgactaccgggacgaccaccacttcatcgtctcggacatctacttctcctcgagcgttttagttggtttcttcacctttggtgtttctaattttcttttctcaagaaaatagaaagggtaggaattagatggtgtttatacctactaaaagaatttggtggattttaggtacaccgtcttaatttgtgggtttggggtggcttaaattgcactttgggaaatggggatagatgtaacttatctttt

SEQ ID NO: 3265 - DNA, 164 bp, Lilium asiatic
gcggtttactgtatgtgtgttcctcacagaggactagatatatatgcttgaaggttacactaaggaaaaaagaggaaatttaaaaggaaaaaaaaaaaaaaaaaaaaaaaagaccgaaaaaaaaaaaaaattaaagggtaacttaaaaataaatggggcggccg

SEQ ID NO: 3266 - DNA, 268 bp, Lilium asiatic
cccacgcgtccggggacggatacaacagcctacggcttagagagaacaatgacggaactaatgcacaatccagaagccatgagaaaagcgaagaaggagatagcagaaacaataggagtaggaaaaccggtggaggaatccgacgtggcaaggctgccatacctgcaatcagtgataaaagaatctctgcgaatgcacccaccagcaccactgctactgccacgaagggccaaaacggacgtgcaagtctgcggctacacggtcccac

SEQ ID NO: 3267 - DNA, 397 bp, Lilium asiatic
cttatgccacactcaacagcaccgcgattggctcacactaacacaactgttcctttcttactttcctcaacttgtttcctacttaacgcgtttacgtgagccaatcgctgatctcgcgctttctataaagcgcgagtcacaaccactggaacttaccgaactgaactcgtaagtttattattcttctgtcggcttagccatggacgaagaagatgtgcgcacgatcttcagcaagttccacacgaacgtcgacgtgcagatctcgtgcgcggagctgaaggagatgatggcggcgctgagatccaaaacgacgtccgacgaggtgaaacgcatgatggcggagctggaccggaacggcgactgctacattgacttgaaggagttcggctagttccac

SEQ ID NO: 3268 - DNA, 308 bp, Lilium asiatic
gacttgcgttaactttctgcatttacaggaattcactgatacgtaattctggataaaaatcgatgcttaacttgtgtcatacgtaacccgtctactatatcctcttaaattaattcactcgtttgatcttgatggcgtcatatcaagcgagacttatccttctgaagtagctaaggagatctttgcataaacaccttagacagcttctctgacgatttgctcgataactccaacattggtggactggaatgtcaacatacagggtctcgttctgatactctgtacgaggggaaaacctttgatggtac

SEQ ID NO: 3269 - DNA, 229 bp, Lilium asiatic
cccacgcgtccggggttttgagttcgccgccgctgccgctgtcgcccgcaacgatggtggagaagggtagcaaggggaggaaggaggacgtggtcaccacggagtacaccgtaaacctccacaaacgcctccatggatgcaccttcaagaagatggctcctaaagctataaaagaactgaagaagttcgcacagaaagcaatggggactaatgatgtgaagattgatgt

SEQ ID NO: 3270 - DNA, 252 bp, Lilium asiatic
ctttgattgcaacaagtgtttgtgaggcctgtggcggattcaataagtcggagaaaaagagtgctgctggaaagcggaaacgataggagagaggatgggactgggaggaacatctatgagtggtgatcttaatgatgttgtaccatgttataaaagcttttatcattatcggcatattatctgcatttttcattgtaactactttctttgtaaatataacattggttataatccgatgcactttttcatttt

SEQ ID NO: 3271 - DNA, 129 bp, Lilium asiatic
cggacgcgtggtcggacgcttgggtcatgctctatctgaagctgtaggctggcttttggggctctagcctggttaaattatcactctacttatagttgatgcttgctgcgctagtctgtcattttgcta

SEQ ID NO: 3272 - DNA, 142 bp, Lilium asiatic
aaaaaatggaacaagctctttaaaaatgtcaatttcatctctaaaccctttggcttctacgttataggactgaaggcttgtgttgcgtcttcctggattttgtaagttatgtaacttgagcagcaatgtatgggttcatttt

SEQ ID NO: 3273 - DNA, 291 bp, Lilium asiatic
gcaatcctgatttgaggctgaagggccacaatactgagggatatggtttatcttggagtgggttcaaacagggccacctgttaagcggttcggatgactctcaaatatgcttgtgggatatcgaagcaactcctaaaaacaagtctcttgatgctcttcagatttttaaggttcatgatggagtagttgaaaaatgttgttggcctttaaaaacataattttctgttgggttcagtgggggataatattaaatggctatattggatcttacgacaccgaccggttacaagc

SEQ ID NO: 3274 - DNA, 414 bp, Lilium asiatic
ctcacgcgtccggtgacggatacaacagcctaccgctcttagagaacagtgacttaactagtgcactggccagaagccatgagaaaagcgaagaaggagatagctgaaacaatatgagtcagaaatctggtggaggaattcgacgtgtgaaagttgccatacctgcaatcagtgatatcagattctctgcgaatgcacacaccagcacaactgatactgtcacgaaaggccacaacggacatgcgagtctgcggatacacggtcccacatgtgacacagatcctgatcaactactgggcgatatgaaggaacccgtccatatgggaagacgtacatatgttatatgcagacagattcttggactctgacatagacttcaagggtcgtcacttgaagcttaggccgttcggtagc

SEQ ID NO: 3275 - DNA, 109 bp, Lilium asiatic
cccacgcgtccgaaaggagtaatcccctgtgacacgttcaataaaaaaaaatccttttgtggctaatcatttatcggcaaaaattgaaaaactaaccataagggaggag

SEQ ID NO: 3276 - DNA, 70 bp, Lilium asiatic
aaaaatatgtgactttgtccattctattgcctgcttaatgataatgtcaatgtttccagtgtatcttaac

SEQ ID NO: 3277 - DNA, 367 bp, Lilium asiatic
  modified_base (351)..(351): a, c, g, t, unknown, or other
cccacgcgtccggtacgcaatatttgaaggttgtgttattctgaaagagaagatagggagggcggtttggtttggtgcaaatggattccttagaagacagcggctgttgggattttctcgattactctttcatcgatcaagcgccccctgatttcctttggtccaataacaataatagtgtgagcaccgaaattgacattccaggtgatgctgttgcttgtcaagagaacaccaagaagaggggacgcaccgattcatgcttcaaggcgggatcaaaagcttgccgtgaaaaattgcgaagggagagactcaatgaaaggttctgtgacttgagctctgttttgagccagngagacctgtgagaaca

SEQ ID NO: 3278 - DNA, 296 bp, Lilium asiatic
tctcagcgcaatcctccgtagcatatattcattctctcataggtataaataatcccgaatcgaggtgtcggttttgaaaagagttaacagtctcttctcttctcttcgctcctccacttgtttgcccttcatggcggcatctcaggcaagccttctccttcaaaagcagctcaaagatctttgcaaaaaccccgtcgacggcttctctgccggtttggtcgatgaaaccaacattttcgaatggagtgtcaccataattggacccgccgatactctttacgagggggggatttttc

SEQ ID NO: 3279 - DNA, 368 bp, Lilium asiatic
ctagccttggaggagataatatttcttcaagatcaaggtccgtcagatcaggatgtctcaggtgtccttgaaattgaacagagagcacatgaaaatggattacaggaaaattataactggttggatcggattctgcgtagctatcaatcacgatcctattttggtgatttgagtgcttcgttggaaattcaaaataaaggacgtttaaaagtcaaaaattctttaaaaccttttacagtcctgttggctttacaaaaatatttgccttttcattccaaaaggcattcacctgtgttatttttattccccatatattaccggtgaaggtattgaaatccttacttctggtgaaaatcaatggatttaac

SEQ ID NO: 3280 - DNA, 298 bp, Lilium asiatic
agaaggagccactatactaaattaaaaagtaaactacataatgaaacgttttttaaaaatattatttatatatatatatatatatatatatatatatatatatatatatataaaattagagagaaatgagtgtttccttaagggagataactcatagtccctagagaactaaattatattactaaaaaaaaaaaaaaaccgaaaaataaaaaaacagaaaataaagaaaaccaagcaataaaaaaaataaaaaacggcttcattcaaaaaacaattaaaaaaggggggccgttttaaa

SEQ ID NO: 3281 - DNA, 278 bp, Lilium asiatic
gcgttcttcacgcgttcctccactcattcaaccactctttctattagcaattggcaatgtccaaagggcaggatactggttctcctggatacccaacatgtatatcgcggtattcttaccaatcaagtccacctcagacaagtggtaattctgactcgtcgtccgctatttcactctctaattcaaatggagacgggcagagccgaaccgataggattgtcttttaaactcttccgtaaaagccccaccaatttgcctcttttacttttagcccaggt

SEQ ID NO: 3282 - DNA, 439 bp, Lilium asiatic
cggacgcgtgggttttaactaatgcaaacaggcacctagttggagaagctctgagttctgtgactgtgaaggagctcaagcaattggaaaacagacttgaaagagggctcacaaggattagatcaaaaaagcatgagttgctgtttgcagaaattgagttcagtcagaaaagggaggtggagcttcaaagtgacaacatgtacctgagagctaagatagcggagaatgagcgaactcaagcagctatcgtgcaagcaagggctgagttcgatgcgcttccaacatttgattccagaaacttctaccaggtcaacaacatgctggaggctccaccccactatcatcatcaggatcagacagcccttcatcttggctacgaagccaaagacgattcagttccatgaaagctaagagggtgtactggtcatattaattccac

SEQ ID NO: 3283 - DNA, 169 bp, Lilium asiatic
aatccaagcttacttacagttgcattcgagaatttatttattctatatatacacctaaattcatttcaatatacatctctttacaacctcttgacttaaattaccctttttttacccaacttaatttcctttcaaaacatccaccttttttcacctttcacaatattta

SEQ ID NO: 3284 - DNA, 420 bp, Lilium asiatic
cccacgcgtccgcccacgcgtccgcccacgcgtccggtgagcagttggcaattcccagaggcctggaaactggttctcctggatacccatcagggatagcgcgggattctcaccaatcaagtccacctcagacaagtggtaattctgactcggcgtccgctatttcactctctaattcaaatggagacgttcagagccgaaccgataggattgtctttaaactcttcggtaaaggcccgatcgattggcctctttaactgaaagccaaggttctaaactggctgcccaccagtcctccaaatttgggaggctttttaaggcccggtggcttaattttaccccttatttttgggttaccggatatgggtgggaggagccggcacgtgatcttaccttcagcctgaacaggcttgtgcatat

SEQ ID NO: 3285 - DNA, 444 bp, Lilium asiatic
ctgtttcagtctataaaacaattcctaaattgtggcaatggtgtgcatgtcagttagttagatttttatcaagatattccctctcacttcttatggaactctttcatcacttccaaatgctccctccccacataattctttctttttgagagactagacaagaaattaaaagaaaagacagtcagaattaatggagaattcaaattctaattccagaaaaccaccaaagaatgggaataggatgattttggagagaggggtagttgggttgggcatagtagcagccatgaactccactgatgttgttgtctcctctgctaaagctgctgctaactttcgtggaaccacaacctatgactatggcattttctatgcttccccttttaacaatactggaacccgcttccctcattttctcaattcctgcaatctttgcgacaaaca

SEQ ID NO: 3286 - DNA, 426 bp, Lilium asiatic
gtggtgatgactttgatgatttgcacatgatcaagtatgacaatcctgctggtcgaggactgtcctcattcagggctatctggggatgggacgactcctttctgtacatgggaagcaataagagggcgattgatgtaatttccactgctgacagaacgacgacggctttagaaagtgaacacatgacttctatcccctgccgttttgcagcccacccgtttaaggagggatctctggccggtggtaccgtcggtggcaaggtgtacctatggacaaaattctaagaattggaaggacttgtggttatctatactttccttgaggggtttgtaactttgatattttgatgcaaaggtagggaattgtaatcctgggatgttattcaccttttgagttctgaagcaatgagtaacactttctgtaggt

SEQ ID NO: 3287 - DNA, 81 bp, Lilium asiatic
aaaaaacaaaaaaaacaaaaaaaaaaaaaaaaaaaaaaaatataaaaaaaaaagaaaaggagggccattgggcaggatcca

SEQ ID NO: 3288 - DNA, 352 bp, Lilium asiatic
cggacgcgtgggtggcaaggatcttgagactgtgaggccggtgattgattgggccaagagttcaggtgtcaagcaattcctgttcgtcagcagtgctggaatctacaaaccaacagatgaacctccacatgttgaaggcgatgttgttaaagcagatgctggtcatgttgaagtggagaaatacattgaagaaacctttggaagttgggcagtgttccggccacagtacatgattgggtctggcaacaataaagactgtgaggagtggttttttgacaggattgttcgggacagacctgtgccaattcctggctcgggactgcaactcagtaacatagctcatgttagggac

SEQ ID NO: 3289 - DNA, 440 bp, Lilium asiatic
  modified_base (363)..(363): a, c, g, t, unknown, or other
cccacgcgtccgctttcacttcttctctctcacccttcaactatgagttactacaaccagcagcagtcacccgtcggtgttcctcctccccaaggttacccaccgtcggaatcttactgaaaggacgcgtaccctccgacagggtaccctccacagggaggataccctccgcaggcgtatccagcacaggggtaccctacaccctacgcgcctcctcagtacgctcagcctacgtcgcaacaacaccagaattcatctggcccgagttgcttagaaggatgtttggctgatctatgctgctgttgactgttggatgcctgcttctgagaaagaaaagagaggttgctttgcacatattggatntgaaactgtgatttgactttgaacatgaccattatcgctcttagcttttattattttctatgttgacttacatttcg

SEQ ID NO: 3290 - DNA, 433 bp, Lilium asiatic
  modified_base (393)..(393): a, c, g, t, unknown, or other
ctcttctccccatccccgctgtctcgccggagagaggggaggagagtaagagagtgacacgggttaatcatctaatggcggcgattccgagactccccatcgccatagcggtgctcatcttcgccatcgccctacctgccgcacaggcacaagcaccggctccagcgccgaccagcgacggcactacgatcgtaccaggaatcgcatacgtgctgatgctggtgggcgctggtgcctgcaatccctgattcatccatgggatgcttcgtcgccgtccaagtggttctgattttaccatggaattagtggtgggaaagttggggttggattcgggggttgggtggggtggaacctttaaagttggttttaaaataagaaaaaattattcctggnaaaaaaaaaaacaaaaaaaaaaaaaaaaattggttattaa

SEQ ID NO: 3291 - DNA, 422 bp, Lilium asiatic
ccggatctgggccacccatttccgcggtggcgtggccctcatctccgacgacaaggatctcatgtgtcaatgtgcaccctgtcctaatgctgattgggttcgtaattctgaatggtgaagccatgttagcatacaagaccatgtcagggaccagaaatttcagaaagacagttcatctcacgatacagctcgttgccttctgtttgggcttgattggcatatgggcagctataaaattccataatgacaaggggattgacaacttctatagccttcactcatggttgggcctggcatgtctaatattatatggcattcagtggggtgctggatgtgccacctttttgtacccgggtggctcaaaaacccaaaaaggttccctgctttcctggcatggatttttagggatatatatttatgct

SEQ ID NO: 3292 - DNA, 435 bp, Lilium asiatic
cgacgaggtggtcactccctccaaggccttcaaattatgctccaccagctacaagaccgttgcaaggctcgatctccagagtgcctggagcagcacctggctactggagacctggataagaataatattgatagtgagcagaaattagcttatgattgggatcatcaaatgctctaggaagccgaatccactcttgagaaggttgcatcggtaaagttggccttctgttagatgatcagtgcagccacagtattgtacatatgtatttagacttctgcaaatgcagacgaggggtgacccttggtatttgtgggtagagttgcatcataaaaatagtgtctaaaaaaaaaaaaaaaaaaaaaaaaaaaaaaaaaaaaaaaaaaaaaaaaaaaaaaaaaaaaaaaaaaaaaggggggggccgttttaaggatccaa

SEQ ID NO: 3293 - DNA, 263 bp, Lilium asiatic
cccacgcgtccgggaggagagatagatggcaggcatgtctgacatgcagaagaggcaagcgggaccactcccccctggtcaattcaggggcgctccccttactcgccctcgctctgatcccgtagaccgtgagaaaacttgccctcttttgcttcgggttttcaccaagactggtggccaccactcggacgaagaatttgctacgagaggaaaggagcccaaagatgaagtccagatatatacatggaaggatgctacacttc

SEQ ID NO: 3294 - DNA, 244 bp, Lilium asiatic
atcacgcgttcggtaccgaatattagaaggttgcgctattatggaagagtagattaggtagggtgctgggcttgagacatatggaaagcgtataagacatgcgctgtaaccattatctggattactctttcataggtcatatacgctgagacttactctgcttaaatatcagtaatagcgttagcacctaaattgacattccagctgaagcggtagagttgcaagagaacacaatgaacatggg

SEQ ID NO: 3295 - DNA, 398 bp, Lilium asiatic
ggtggtttgttgatgctgtgttaggtgcggtaattgagcatcttgatagcatgaacaagagcaaggagcgtgggtttgttggatttcggaacacggggacgtccttcatttcttgggttgataagatgaaggcttataaggttgtcccttcatgaaggatttgctctcttgctttctgcctagaagattatgagtcgggccatcgggtaatgctttcgcaattgattatttttgaatgaattcctacctcttgcttgtgcttttgggtcttctatgctttgtttcagtcattaaaaatgttggtgtgattcggggaataaaccgtttgattgttgtcaaatggtttgtatgctacccttctttaaaatgtagtttaaattgagttctgtttggttttt

SEQ ID NO: 3296 - DNA, 387 bp, Lilium asiatic
gaagaagaagcaagagagagagaggagagaatatggcgaccacaggcgctttgtgtggcactatgttgaacacctccttcctgaagaggcaggcatcagtgaacatgacaagcttcaaggctaacgctgctgtctttggtgtaaaaggaggacgaggaggtcgtgtgagggccatggcaacttacaaggtgaagctgataactccagagggagagcaagaatttgaatgcccagatgatatatacattcttgatcaggcagaggaaaatggcattgatcttccctactcatgcagggctggttcttgctctgcatgtgctgccaaagttgtgagtggcaaactggaccagtcagatggtagcttccttgatgacgaccaaattgatg

SEQ ID NO: 3297 - DNA, 309 bp, Lilium asiatic
ctggctcttggttcaactattggtcccgtaggcggggatgatggtagtaagggcgacagacaacgatgcttgatcccaaaatatcaactatatttttctccttgatgatgtttctggagttcactcctagaatgatatctgtgtaatttggattctaggtttttaagccttctattgtttttatataaaagggaaaaacaatgtaatttgcttctaaaaaaaaaaaagcaaaaaatgaaatatacattattgaaaaaacaaaaggaaaatggcattaaaattaccctactatgctgggcttgctcttga

SEQ ID NO: 3298 - DNA, 327 bp, Lilium asiatic
aaagacggctctgagttgcaatctctagccgctgaagctctatctaagaactacaagcagaaagctcccgaaaagctccctctcctaaccagtgctctgcggaatatgaaacttgtctcctgatgctctgtcattcttccgacctccaaaacgttgattgttatattttctttgatagctatggtttcttcttccgtggcttagagcgattggagaatcgccatcattactgtctttgttattcataaagtgttggcggtactctggataattttgttgtgatgctcttccggttacgcatcaatgatacaagaagtttctactgtt

SEQ ID NO: 3299 - DNA, 320 bp, Lilium asiatic
gcgagctcatccttgctgtcttcggttaattgggattatgttaaggatattgttttttcgattgatttgttctatcaagcaatgaaaaagtttgcaagcttcccaatcgccactgctaatctctattttcaagatatatttagcatttatttgctgctaaaggatgcgtgcaatagcctcaatgaagctgcggtgtccatggcttcacaaatgctcaaaactttcgagcaatactggggcataaccaggatcggtatggcgattgcatcaattctggatcctcggtataagatgaagtcgatagagtttttcttcaaaaa

SEQ ID NO: 3300 - DNA, 263 bp, Lilium asiatic
gctgatcttcggaatgtctgcacagaagctgggatgtccgcaatccgtgcggaacgtgactatgtcatccatgaggattttatgaaggctgttaggaaattgaatgaagcgaagaagctggagtccactgctcactacaacactgattttggaaaggactgagagaagttcggcagcgcaagcatcttcttcctgggcgatttagttgcagagggaactttttaggtctcttcgtgaagtggttttggactggatactatttc

SEQ ID NO: 3301 - DNA, 242 bp, Lilium asiatic
attttattttgatttcttgtttgagctgctggattgattgtgtgagtttgagtccatcttgtttttctcctaatgttgattggagaaaataatggtagatctattaatctgattgaaatacctttttttattattaattgtacttttgatatctaaaaaaaaaaaaaaaaaaaaaaaaaaaaaaaaaaaaaaaaaaaaaaaaaaaaaaaaaaaaaaaataaaaaaaaaatgtcattaataaa

SEQ ID NO: 3302 - DNA, 98 bp, Lilium asiatic
cccacgcgtccgaaagagaacaatgttgtttaattgttgtttcgacagtgttacttttcatctggtttgagtactagttgtccaatgaacatttttct

SEQ ID NO: 3303 - DNA, 224 bp, Lilium asiatic
atcacgcgtccgggaacatcaaagaaaaaatatcggtgacatagtacataaattggcgtagtttcgagggattatcggatgagaatatcccgaactatgcacactaatccaggctgctgacaatggctacctgaaactcgctatgtatactctcacctattcctcaaaccctaacgacccttcaccgccttatgctcaggtttgcaaactcatctccctacccg

SEQ ID NO: 3304 - DNA, 284 bp, Lilium asiatic
cgtctccgcgtatcggcggcgtgaggcgcggtccggcggcgacgttcgtgtcgtgctcgggtgcgactgcggaggaggctttcgtgaaaaaaactgtgtcgtctcatgacatcgtcatcttctccaagacctactgcccgtactgtagtagggcaaaatctgtcttcaaggaactgaagaaggtaccatttgtcgttgagctggataccagagatgatggccaggacatacaagatgcccttgctaagttggtcgggagacggacggttcctcaagtgtttatc

SEQ ID NO: 3305 - DNA, 440 bp, Lilium asiatic
cccacgcgtccgcactttcatccttgtttacaccgttttctccgccaccgatgccaaacggagcgccagagactcccacgtccccattttggcacccttgccaattgggttcgctgtgttcttggttcacttggcaaccatccccatcaccggaactggtatcaaccctgctcgtagtcttggtgctgctatcatcttcaacaaggaccttggttgggatgaacactggatcttctgggtgggaccattcatcggtgcagctcttgcagcactctaccaccaggtcgtaatcagggccattcccttcaagtccaagtgattcaatcaaacggttcatgcttaatcaagttgggaacaacaacaacaacaaaaatcaagccaatgtttgtgggttttggtttcatttcattaagatgatctgcttatctcttttcttcttt

SEQ ID NO: 3306 - DNA, 227 bp, Lilium asiatic
cacagaggttgctcataggagttagaatgtcaaaatttgaaagaatgtgggtagctttggtaatgatggcagtcgtacccaacactatccaagtggatgccaacatttacaagagcatgcacctcacttggggtgttcagcacgcgttaattctgggcgaagaccttcatcttgtgttggataaaacctcaggatcagctgctcaatcaaagagatcattcttattt

SEQ ID NO: 3307 - DNA, 377 bp, Lilium asiatic
cgtcaatcccagcagccatgtcgtccaagcaaggtgggaaggcgaagcctctgaaggcggcgaaggtcgagaagaaggaatacgatgagaatgatctagctaatcttcagaagaagaaagaggaggaaaaggcactaaaggagttgaaagctaaggcagcacagaagggggccctatgaggctctggtctcaagaagagtggaaagaaatgagcacgataatggttattctatcatgtagtaactgaagtatctcctgacttcgttaactcaaatatgtgttgtggtgtttaaacattatggtcctgcttatgcctcgttattaaatggtggaatcccgattggggtggtaaaaaaaaaaaaaaaaaaaaggcgggc

SEQ ID NO: 3308 - DNA, 410 bp, Lilium asiatic
gaattcctacaagatctctgccaagcccaccactgctgctaagcctaagacagcctctgcggagtcaaccactgttgctaaacccaagtctgctgctacgaaggtgaagaaagcagctgtaaagccgaagcctaaatctgctgctgtgaagcccaaagccaagcctgccgcacctaagctgaaggctgtgttgaaaccaaagcctgttgccccaaagccaaagactgctgctccggctaaggcggtgaagacatctgccaaaccttcccctgcaaagaaggccgctccggtggcttcgaaaaaggctaagccggtgaagaaagcaacaactcccaagaaagcgaagaaatagatttatatctgcctgcggggttgaagttgatagatagcctggatgttttagtatgggt

SEQ ID NO: 3309 - DNA, 291 bp, Lilium asiatic
  modified_base (191)..(191): a, c, g, t, unknown, or other
cgcaggtatgcaatccttgttgacgacctgaaagtgaaggtcgcaaacattgagcaggctggggaattcactgtttccggtgcagaggagatccttagggctctgtgatctgctttgcttttagtcccaccttgtttcttaattatgttgggctctgttatgaactatgtactgaggattctatagcttangaacttgtgctcggcacttgagttgtctggtggttgtggtttgttctctgagtttggtcctatggtctttatcttttggtgaataaaagttatgagtcag

SEQ ID NO: 3310 - DNA, 414 bp, Lilium asiatic
caagctctgtgttgtttgttctccaccaccatcgaatctttatgagatttggggggggaggatatctgtgaggatggagtgattattgggagtggtgagaaccgcttcatgggccatgaaggagggtggcaggaaacctatggagggcggctagaatcctagagggagagccaccattgaagcggattgtagacataatcaaactgcttccgagtaattatttcaaaagagcagtattttagttttgagttcaagtcttatttgcgccttataaatgaatattattgtattagtgaaatgccgggaagtgtttcccgatttaaaactatccatttattgaatgattgctaagcaaattttggacaagtgtagtttttcaacctttttatttacttaccatgtaaccatgtgcct

SEQ ID NO: 3311 - DNA, 430 bp, Lilium asiatic
cccacgcgtccgcccacgcgtccgcccacgcgtccgcggcaggtgagagagttctttattggaaagacatttgggttgcagaaaattcgctgcaaaatctatttaaaaaatgctacggattatctacaaaaccagaaggaatcatacatgagttaagaaaaagcaggaatggagttgtcacatggagggcactttttgatagagagatgagaagatatcagcaagctattggagattgatctaaagcagtcagctttttgaggaaagggataaactaatatggaaaacaggaaatcaaggaaagttttcagtgaacgtttttcataaacagttgatgaaggacaaaattgctgaccggaggagagtatggcagtgaacaaaagccgaaatggaccagtcagactccagccagattttgcttcttcatgtg

SEQ ID NO: 3312 - DNA, 430 bp, Lilium asiatic
aacaaaacttatcaaaatctcatatactgattcagttctatacataaccatcgagatttattatcaaaccaaaaattctcaaaatctcttcacctctgtgatgaccatggaatacagaaccttagaactcaacatcatatccgcaaaggacatcaagaacgttaacctcttctccaagatggacgtatacgccgtcgttacgctctccggcgaccctctccaccctcagggcgccaccacccacgtccacaaagacgccggcagcaaccccacgtggaactaccccgtgaaattctccgtcaacgaatcgctggccaaggagaatcgtttgtctcttgagatcaagctcgtctccgaccgcaccctcggcgacaccgttatcggcaccgtccatgttcctctcagggaactcatggacaatcccggcgac

SEQ ID NO: 3313 - DNA, 306 bp, Lilium asiatic
aaaaagagttctttcaaaatgcaaacagccttaaccttcgctgcccccaacgttgtgccattggcacccacaaagagtgtctcccatattaccatctttcccaccaaattgaaagccccgcgctcctcacctcgttactctccgattagggttgcaaccgtggagcccgacacttcaactgtcgactacaactctgcgttctcagtgtttcctgcagaagcatgcgaaactgtatgaggggaagcctgcatggcggagatgtaccctgaaacgaagctacagccagaggctaagactccacgagtc

SEQ ID NO: 3314 - DNA, 182 bp, Lilium asiatic
accgacaagcgttcttgaaaactgcaaacaggcttaaccttggctgcactcaacgttgtgccagtgtcaccgacaaagtgcggatcacatatcacgaacttgcccaccaaatcgaaagccacaggctcagcacctgaagactcgccgaatagggttgcagccgtggagcccgacacttgaac

SEQ ID NO: 3315 - DNA, 437 bp, Lilium asiatic
attttgaatacgaagatccaaatggagcggtgaatgagatatggcgacaagtctctttgagggtttcgctaataaaactgatgattaaccgtgacaaacgccttgtcaggagagatgtggatgctcctgactgttcatgtctttgctcacgacaaaaccagacaattacaatgaggtgaactcaaatattttccataccaaagcaaaaactctggtgggccttttttaaggaagaattggttctgttctggagaatgataacttgtatggcgcacgtctctaaaacatccaaggcagaagaaggtttgcactagtacaccgcagttttacggattgttttgctttcattaagcttatattttaagctagttttctcaattttctgagtttctcttttctttcctattcaaaactataggataagtcaacagctgctg

SEQ ID NO: 3316 - DNA, 244 bp, Lilium asiatic
  modified_base (87)..(87): a, c, g, t, unknown, or other
gggactacgcctcttgaacgagataatggttctgttgacaatctggcaaatcttcctcgtgggaaatcgatgacatggaccatgcanaaccgacattcaacgcctgcaaatcgggttgctataatcaccttaaagcttcaagattatacaaagtctccttcaggagaaatagaagtgaaatttcagatttccaaagacacactggatgccatgctgaaatcaatggtccacatcagcgagcaac

SEQ ID NO: 3317 - DNA, 308 bp, Lilium asiatic
cccacgcgtccgcgcgctcctctgcaccaagaagcaaccatctgataggccaaccatgcgggaggtgagccgtgtgctcggaagcctcgcccagccgagccctccaccgaagcagcagcaactgcttgcattgccaccgccctcttcaacgcctagctacattggcgagtacatcaactccaagcaccccaacgcccttacctgcactgcttccctgagctcgtccgatgctcaactgttcctaaagattggtgaggtgatatcgcataacaccgagtgagcttcaacatatttgtatcattttgcat

SEQ ID NO: 3318 - DNA, 354 bp, Lilium asiatic
  modified_base (89)..(89): a, c, g, t, unknown, or other
catgttacacattttgtaatcaaaaagtgagggaatctctaaaaagaggaaggcttataatgtgtgtataggggaaactaaacacttancataaagcattggaaattttttacccaatctcaaatttattttatgaatccaagtttaaagttattgatagagataaaagtcaattcatggtgcaaaattatggcaactaatcaactaaagaagataaataagtttttctgaatatactaggatagacataaaaactccttatttactcccattattaatttatagagagagggattaaaaaaatttacccagtcaagtcctggtagatatttactttattttgattattccttt

SEQ ID NO: 3319 - DNA, 435 bp, Lilium asiatic
cggacgcgtgggttcgctacttacagtactgccttagatctgaagttctccaacgcttcgccctcccgtcttctctctccccgttgtgattcaatggctacagttgaggttcaatctgccacatctgttgtgcctacaacagaggtccaacaagaagtgacaaaagatgtactagccgagaaagcaatcgaagaaatatcagtagagaagttaaaggaggaagcaacaataacaatcgaagcaccaactaaacaggtgaaagaaactgagatcaccaaagaggaagaatcaagtgaagtggtagaagttcaaggaactgaggtcctgaaagaggaggaattaacaaaagaggaagcaaaagcagatgaactagttgtagaagcaacacccgagaagatgaaggatgttgaagatgctactacggtgaccactaat

SEQ ID NO: 3320 - DNA, 422 bp, Lilium asiatic
atcacattgaacaatggtgaaggctgtggccgttcttgtcagcagtgagggtgtcactgggactatggacttcgttcaggagggaagtggtccaaccaccgtaactggatctcttgctggtcttaagcctggtctccatggtttccatgtccatgccttgggggacactaccaatggttgcctctcaactggatcacatttcaatcctaataacaaggagcatggtgcccctgaggatgagaatcgtcatgctggtgatcttgggaatgttaatgtcggtgatgatggtactgtcagcttcactattactgacagccagatttctttcactggaccaaacaacatcataggaagggcggtttgtggccatgctgatcctgatgatcttgggaaaggtggtcatgagcttaacaaaactactg

SEQ ID NO: 3321 - DNA, 429 bp, Lilium asiatic
cccacgcgtccgcccacgcgtccggcagaaagcaagctcatcctagagttttaaaaatggcagcagcctcctccatggctctctcttccccatccttggctggcaaggccgtgaagctgggcccatcagcccccgaagtcgggagggtcagcatgaggaagaccgtcaccaagcaggcctcctccggaagcccatggtacggcccagaccgcgtcaagtacttgggcccattctctggcgagcccccgtcctacctcactggcgagttcccaggtgactacggctgggacactgctgggctttcggccgacccagaaaccttcgccagaaaccgtgagctcgaagtgatccactccaggtgggccatgctcggggccttgggctgcgtcttccccgaactattgtcccgcaacggggtcaagtttggag

SEQ ID NO: 3322 - DNA, 194 bp, Lilium asiatic
gagctgagaacgtgcagaaagccaacgcggttaaccataccaggcatcatcaatgttacgtggctacggacatgtagagtatatcatactacgagcattacctaccaaaatgctatctactaaacgtcatgactgcctgcttgtgcgataaagttgcaaccgtggagcccgacacttcaactgtcgactacaac

SEQ ID NO: 3323 - DNA, 305 bp, Lilium asiatic
gacacgcgttcttcaaaaaggccaacaggcttaaccttgcctgaacccaactatgtgccagtgtcaccgacatcttgcgtatctcatattaccatctttcccaccagatcgaaagcatggagctcattacctgggtactatacgattaaggttgcaaccgatgagccaggcacttgaactgtaaacatactactatgagttgttagtagaatcctgtataagcatactaggctgcattgggagaagcctgcatgtcgtacctgtaccatgtaacggagctactgccatctgctatgaatccacta

SEQ ID NO: 3324 - DNA, 440 bp, Lilium asiatic
gaggcctaatggaattgaggaaactagggatcgagcaacagttatgggaagcttcccgtggggagatagagctagcctctccagcgagtaatctaaaggatacagagatggcataggtgttgatcgtgaacatacccagtttttcctctgttaatgatgtacctatcgttcgatgccaatgccaaaggatatcagagtacaagtatcgtgtaagttgttggttagtgagcaactgtatttgttttgtaaataggcggggggctttgtttcctggaaagttagactgaacacaagtgtttggtttggcagttctttctcccattattggtaagtagctgctaaattcgcaattcttgtgtagaacccgctgaataaaagttgaagctataagtgatgcacgttaacttattaagtttttacctctgtttacagacatactg

SEQ ID NO: 3325 - DNA, 393 bp, Lilium asiatic
ctgctcttcgtctcggctctgctgctcgtcctctccaccctcaccgccgagggtgccgccggttacgatgtctctggcaacatggtcaaacccggaactccctactacatcacatctgctatatggggtgctggtggtggcgggctcttccccctttttcgcccaagaatctgcaataaatgtcggtggtgctgccccctaaatgtggctcagaagtcgagcgaccttgacaatggcctccccgtgtccatgtccccctccgactcgagcaaaaaagtcgggcttttcctaaccgacctaaaaatgaagttaacatttcctccttccaatggggggccgccagattgaaacctgaccagttttaacccaaccggccacgatttgtgacactta

SEQ ID NO: 3326 - DNA, 441 bp, Lilium asiatic
aaaaaagtaatgcttatacatgcaaaacacagggttctggtcacgagtcgatcggtggtggtgaaatgacgtaagaagaggaagatgatgcccaaaagcgaggaagtatccagtttgaaaattcctgatgaactgcggcctatgtttgttggttgtcaagaaggcgacagattggatcacatgaatgggagggatgcacctgaaactctggaggatgctgttggcgaggttaataatggtatggaagctggtgaaaccaatcacaaaaggcaaaaaagctcatttgctcacgaaggccctgccgagattctgttgacatttgccccatgcatcactctgccttctaaaggccacataatctctacatttagcaaatacggacatctgatcgaggctcagaccgagttgctgaaagaatctggttgtgctagcgttgtgttt

SEQ ID NO: 3327 - DNA, 427 bp, Lilium asiatic
ccgacccacgcgtacggcggtcctatcgtgagcggcggtggagctatcgaggggccgggggggcaatggggcctgctactcctgtgtgagcaaatcacatgtctctgactgccctactgtctgatgagagcggggcatatattgctgggtggcagagaggacgattggatgacgagaggcggcggatgcacctgtacttctactcgttccttgagtctagccacttcactaggtagtgcccgtccaacacgaggtgaatacctaacctgctctatttttatactaactttatggctttgcgctatgtttttgacccgtctcatatgacatgtcgtgttatggcatattaatggttggatctgtacttcctctcgtttatgtggacttcgatcccaatagctggtggtattttggcggccttcttctc

SEQ ID NO: 3328 - DNA, 137 bp, Lilium asiatic
atcagttcctcttgctcactaatgcgatgttttattcttttctatgcaactatgcctaaggctaaaggcgtatttgacatgaccatcgggagtcaacctgtcagccgcatcgtgatggagctctatgccgacgttac

SEQ ID NO: 3329 - DNA, 293 bp, Lilium asiatic
cggacgcgtgggaccacatctgcggggatcatggaccatgaagaagctagaaggaaaaatgtgggtgggaaagtactcggctttttctactagattggcttttactgagaggatggacttttcctttcatgttttcctgagtcttgaatttcggatctgagacttaaaagctctgttttgtagtttgctgttgtgatacatgcttgagtaggattttaagatgaattatctcttaaaataaaacttggtggggggcgttggcaaaaaaaaaaaaaaaggggggccgtttttaa

SEQ ID NO: 3330 - DNA, 317 bp, Lilium asiatic
cccacgcgttcgctctggggtttatctcgctgaccgagaagggactagggctttacagagtacacgcgggctctctctatcgaccgttttcgtccatcaaatccaatccagtatcaaatatgaatcgtcatcccgaggttaagtgggctcacaggcttgacaaggtctatatcacggtgcaattggctgattcaaaaaatgcacaagtggatcttacgccatatggaatatttaccttatacagccgtgctggtgctgatgaccatcatcatgagcttaaactggagctctatgattaggctaacgttgacgagagc

SEQ ID NO: 3331 - DNA, 207 bp, Lilium asiatic
ctcatgcgttcgtgcgcgtgtgttacagagttttagataatgggaactagccatgccgcggacactggggctctagcgattaatcaacccaatgctaaagtagaaaggttgtattgactctgaagagctacggaagtgatgaagaccaaccctgatcactatatggctcttcttatattcaccacattgagctgatccaaggacaat

SEQ ID NO: 3332 - DNA, 426 bp, Lilium asiatic
ttactacctctgtcagttccaccagcggctttttcagtctccggtcaccacattcggtcggttccagcggcgtctgctacacccacagctcttgctacgcttgcagaaaggtcgatggggtggtcatgtggttcatcaacggcgtcacaaccgctttcttcgcctccttgaaccgttgctcttgcattcgcatcgtcaccggagaagacggctacgatgcctacgacttgccgctgatgctcaacgacggaaacctgcgtcaggatggcgacgtcgctgcgtgcaccagctacacgagaacgacgggtaaagggaagaatagtgaagctgatctcgttgacgacgactgaaaaacagtggtaacaagaacggactacgtaccccttgatgaggccttgaacaaattcaatcatatcaatggctatc

SEQ ID NO: 3333 - DNA, 395 bp, Lilium asiatic
tcgttgacgcgtgggggaactgggccgctggagaatttggctacacatttgtccgatccatgtggcaagaacattggcgacgtcttgattccaacaaacattttgccatgagagctcaagattacagagctggttttcaccacctaccatgttgtaaaactcaatgtaatcatctgtacaacttgtattcctgacaagaatgattggtataaaaaaaaaaaaatttatttaaaaaaaaaaattttatttgggggtgtagaaaaaaaaaaaaaaaaaaatggatattatataaacccctctattataaaaatggggggggccgctttaaaagatccaaatttacctccccggtgttgcaaaaaaattactttttttttggggcccctaaattaaat

SEQ ID NO: 3334 - DNA, 343 bp, Lilium asiatic
  modified_base (89)..(89): a, c, g, t, unknown, or other
tctcccacgcgttcgtttttttttttttttttttttttttcttttttttttttgggtttttttgttattttttgagctaaattaatttntctttcccacccttcacattgtttttactttgaaaaaaaaattgggctcaataatcctcttcttaaaaaattaaaaaaattttcttttttttttttttaaaaaaaaataaaaaggtttcgccctataaatccttttgcccataatttattcaaaaacatttttttttttttttgtctaattaaaaaaccaaaattttttttttttccaatttcggttctttttccccttttcaaaaacctaccacctttttttt

SEQ ID NO: 3335 - DNA, 332 bp, Lilium asiatic
gttctggtttgtcgttctttctctcgcaatcttcactacattcaccgagcatttgcattcacattgaatatggctgagactacacaatctaatgctgagttgttggagtggcctaagaaagataagcgccgcttcctgcatgttgtgtatcgtgttggtgatcttgatcgcaccattaagttttatactgaatgttttgggatgaagcttttgaggaaaagagatattccagaggagaaatatgccaatgcttttcttggatttggccctgaacaatcccattttgttgtggaattaacatacaattatgggggtgacctcatatgatattg

SEQ ID NO: 3336 - DNA, 307 bp, Lilium asiatic
cccacgcgtccgggatgctactgcttctgttgggatggggctgctggagatccggcgcattgaggctgctcgggagatctcggctacactagcgaagtcggtgaatgtggcgtacctcccgactggaaacaacatgcttcttgggctcaacaccgccggacggtgatcgcgtacttgagttctctctctactttatgatcgatgaataatggcttgtttgtttaccttattagtgtaacttgtgtttcttttgttgttagattataagtgtttttcacctgcttaagactataagatctagattgag

SEQ ID NO: 3337 - DNA, 414 bp, Lilium asiatic
  modified_base (108)..(108): a, c, g, t, unknown, or other
cgcggaccgcgtgggtggtaatggggttatgctccttgtcctggattgggccatacctctcacatgtgctgtcaagtttgcttgagatgcctgaccaacgatcgacanggcgctctggtaagggaaatcgagaaggagcccaagtttttgaagaatggtgatgctggatttgtgaagatgattccgaccaagcctatggtggtggagactttctctgagtatcctccgcttgggcgttttgctgttagggacatgcgccagactgttgctgttggggttattaagagtgttgagaagaaggatcccactggtgccaaggtgaccaaggctgctatcaagaagaagtgaggtgttcttcaatttatgtctgagtttcttaagatctgcaagagtctagttggtaatgcttggttt

SEQ ID NO: 3338 - DNA, 432 bp, Lilium asiatic
ggttttgccgccgtcgccgttgctgccaccggagctcgttgcagcctaaggacgaagtggagctaattgacacttgagaaaatggcccctcccgcgaaagttgccaagaagcctgatggtaaagcacaagcattgaaagttgccaaggctgtgaaatctggtgcttcaaccctgcaaaagaaggccaagaagatccgcacatcggtgacctttcatcgtcccaagaccctgaagaaggatagaaaccccaagtaccccagaatcagtgcccctccaaggaacaagctagatcactaccagatcctcaagtatccactgaccactgagtctgccatgaaaaagattgaagacaacaacactctttgtttcattggtgacatccgagctgacaagaagaagattaaagctgctgtgaagaagatgtatgatatt

SEQ ID NO: 3339 - DNA, 352 bp, Lilium asiatic
ctctcacctctgcggacgcgctcccttagcccccgctatcgccaccgacctttttcgctcgctcctcccatccctagattctctcttacatccactcgagtcttcaccggcggcgctctcgctccgatcgccaacgtcgaaatggccaatgcggcgtacgggatggcggtgcacgacgagtgcaagctcaagttccttgagctgaaggcaaagcggacctaccgcttcatcgagttcaagatcgacgagaagctgaagcaagtcaccgtcgcgaagtgcggcgagcccagcgagagctacgaagactctaccgtcagcctccctgtcaacgagtgcagatacactgtttatg

SEQ ID NO: 3340 - DNA, 281 bp, Lilium asiatic
catcatctacccttccaagatgggttctccaactcctgcggtctataacaatcatattaatatataatctaattatcatcattacttataaacctaactctataacatcatatacaaataagctctacctctctacatgatccaaacttacatactcatgcatcctacatcataactcttctatactacctcctaaactcaattcacattccaactacttacaacacccctactaataaaacccttccttctcccaactaaatctccttacatcacatacc

SEQ ID NO: 3341 - DNA, 397 bp, Lilium asiatic
  modified_base (358)..(358): a, c, g, t, unknown, or other
tttcaagtgctcaaagaagcccccctgtcagatcagcggagcccaagcactctaccgccgctaggcattcatctaacatgaagaactatgagtctgccctcaaaggtttcgggggtctcaatttcgacaatgatgagagggttcaatattagtacttactgattgatctgcttactctgtaaaaatcatgaactcatttgtttcccgcaaatggtcgatcgacggtgaacttaaaccattagggaaaactgcctccgggatatgagaaaataatgaagaatgggtcttgggagctttaagccataacctaccaagggggttctctgtatatgcttgtcgagacgtggcatcttggtgntggaatgtattattgtcataatttattttgtgagtcaca

SEQ ID NO: 3342 - DNA, 379 bp, Lilium asiatic
  modified_base (299)..(299): a, c, g, t, unknown, or other
gcgctcatggcttcctctctcttccttctctctctcctcctcctcctcgccatctcgaaggccaacgccatcccaagggtgaacaggctcggcggcggcggcatcgtcggaggcataacggagatcccaaacgttgccaccaacaaggaggtgcaggacctcggccgcttctccgtcgatgagcacaacaagagcgtccttcaagccaaccccagcgcctccgtcctctcgtttgttcgtgtggtggaggcgcagagacaggtggtgaacggcatcaagtacttcctcacgatcgccgncaccgacggccagggcaaggcggcgacgttcgatgcgcacgtggtggttcccgccggggccaaccgggccaaagagttgc

SEQ ID NO: 3343 - DNA, 191 bp, Lilium asiatic
aaaaaaaaaaaaaaaaaaaaaaaaaatttattaaaaaaaaaaaaaaaaaaaaaaaaaagagaaaataaaaaaaaaagaaggaaaaaaaaaaaaaaaaaaaaataaaaaataaaaaaaaccctattaaaaaaaaaaaaaaaaaaaaaaaaggggcgccctttttaaggatccaaattttagtaccctttatt

SEQ ID NO: 3344 - DNA, 410 bp, Lilium asiatic
ccgcctcttgaggggccagccacagcagatgtctttctggtgaagccggccaaggcgaaggcggcgaaggctcccaaggaaaagaaggtcgtgacgaagaagccggccctacatcctacctatctcgagatgatccgcgaggcgatagcgtccctcaaggagcgaaccgggtcaagccagtacgcgatctcgaagtttgttgaagacaagcacaaggctcacctcccggccaactttaagaagatcctcctcgttcagctacggaaactcaccgctgccggcaaactcaccaagctcaagaactcttacaagatcgctgcaaagcctgttgcttcagtgaagaagacatctgtctctgccaagccgaagataaagtctgctgctgctaagccgaaatccactactgtgaa

SEQ ID NO: 3345 - DNA, 408 bp, Lilium asiatic
gcgaccacgcgtccgaactgaaatctgctatggaggagcatggaatgggtgatgcagcgactatcaaggaaataatctctgacgttgacacggacaatgatggaaggatcaactatgacgagttttgtgcaatgatgacaggcggagttcagcagccagcgagaatcatttagaaccgtgatttcaaataccatgtcgggagctaatcgtgtgaaaccaacatggcaagctgtattagtgatccgaggggaaagtttcaggtattattttgtgctctttatcattgcttctgatggttgtgcatatctggcatctgctcttttggtttttcatgagtgaactagttttatagagacggagctttgatagattgttgagaatgaattgagcgattgatgatacttttac

SEQ ID NO: 3346 - DNA, 412 bp, Lilium asiatic
cggacgcgtgggctcctttgttgtatttgtagctagttcaaggttttgtgatttaggtgctttgaattcctttcccctatgttaaatttgttgcaggacgggattctatgttcgatactgtcctcattgaggctgaaagaagcagtagcaacatgtgttctatcccggagatggagacacctctccacccatctccccaaactcatcttcgacgctgccaacattcttgacgatcgagttgcaggacatcttcgtgacaaacttctccctgtctatatgaaatattacttacagttggtatataggttccagttcatcatatgtgttaatgaaatcctgcagcggcagcaaggccgtgcagtattagaggaattttgtgtacagtattaccttcgtaaagctcactctagct

SEQ ID NO: 3347 - DNA, 413 bp, Lilium asiatic
cgaagaagttattgatggtgatagcgaagatgatgacgacgacgacgaggaggattccgaggacgatgaacgcgaagagacccatgaagaattcctggaaagatatgcaaaagcagcagaggaactccagaatgagatcgttgaagaaggagatgtagaagaggaagtacttgagcttgaattaggcgcactggaagatgttgacattgagaacgaggtggtagtttcgttaatacagagacatcatcaggcccttgttccactggcacaagcattgccagaaagcatccttcaaggaattaaggacactctaccagaatatggttcattatttggggttttgtattaaagaattttcgaggcgtgtttattagttcagtttgtggcttggcagctttgatgtggaactattt

SEQ ID NO: 3348 - DNA, 392 bp, Lilium asiatic
aggatatccaatgggagcacaggtgaaggctgtacaagggattttctaactgacaggtcaactttgagaataaaatgttgagttctttgggtttttgtctctcctcttgagaacacgggactgatgatcgctagtttgacatttctagttttggacatagtagaaaagttgattgtcatggatattgtagccaatgtggcatggttcagtgttgtcatcatgcagtgccacgttttggattggttactgcgatcgggaagtaatttcgctgtgagtaatggagatgtcggcaagaattatatcatagctagaaataatcatttgtgtgaaggattctaattcatgtgaattgggctagcttaaaatctgtgtggttttgctactgttagtga

SEQ ID NO: 3349 - DNA, 197 bp, Lilium asiatic
caacgaggagctctaggcccagctccgcaagaccgcgcgcccggaaaccactatgatgggccaagttaaccgagagaggctggcggaatttcttggggagattcaacggaaagaggacaccaatgatagatacgtcgctgctctgagaggcgagacgctgacgagaaaaccttacgtcagaattcaacctgtgccca

SEQ ID NO: 3350 - DNA, 414 bp, Lilium asiatic
cggacgcgtgggctggggttttgtccatggctaatgctgggcctaatactaacgggtgtcagtttttcatctgcactgccaagacggcttggctggatggtaagcatgttgtgtttgggcaggttgtggaggggttggatgtggtgaaggcgattgagaaggtggggtcgcagagcggcacgaccaagaagccggttgtgattgcggattgcggccagctctaggctgggttggatgggttggggctttctaagatctatattttgatgggaataatggtgtttgagtgtgagcttgttgctgctgccggtctcttttatttactttaatgtttattgtctggtctgtttatctgtgtcttgatcttggatctatgtttgggtacttaggttatttaaaaggagttttactttg

SEQ ID NO: 3351 - DNA, 253 bp, Lilium asiatic
gatggagaatggcttccatatttggtctttccatgggaagctactgtacaagatttggaaggatcacttctttcagttgatgtggcgacctcggccttcatcattgctgacccccgagaaagaagagggaatcttcaagaatctggagaaattccagcaggagttccaaggcaaagaaccagaacttttaacgccagttaagtgaccagaaaaggcaaaggaggaaggctctgcaggaagagtgggacaggtg

SEQ ID NO: 3352 - DNA, 400 bp, Lilium asiatic
gttacatgtgagccatgtataatgtgcgcgacagccttgtccattcttggaataagggcggtttattttggttgcgctaacgataaatttggaggatgtggatcaatcttatctcttcacgaaatcaaatcggagaactccagcggtgatttacaaagaaagggcttcaaatgtataggcggacttatgtctgaggaggcagtctctctcctgcgaagcttctacgaccaagggaatccaaatgctccaaagcctcacaggcctgttcgactcccacaattgcaaccttagcatctttttctctgtgagttttggtttgctgacgaagattaagaggatgtcatcggaaaactaatatgagatcagctattccagactttttttgtgtgacagaaatcat

SEQ ID NO: 3353 - DNA, 175 bp, Lilium asiatic
  modified_base (4)..(4): a, c, g, t, unknown, or other
tcgnccacgcgtccggtagaatttgtcatggccgcaagtgcaattgctgctctcagctggagtggcgtggttctgggatccttcccgatacgggtgagcccctcgaagactcctgttcgcccgcgggcaccacgccaacctatgcattaaaatgtctcctcctggctgaaagtcg

SEQ ID NO: 3354 - DNA, 409 bp, Lilium asiatic
cggacgcgtgggcggacgcgtgggcggacgcgtgggggagttcagatcctcccccgtgcgccaaagccctagcagtgaaatcaacaatgggtaaggtccacggatccttggctcgcgccggcaaggtgaggggccagacgccgaaggtcgctaagcaggacaagaagaagaagccgaggggccgcgcccacaagcgcatgcagtacaatcgccgcttcgtcaccgccgttgttggattcgggaagaagagaggacccaactcgtcagagaagtagagattgatggaggaatgtgtgatgttaagtctaccatgttgtttttaccattttgcttttaggatatgtgatttggatggtgtttgttaaacccagtttttatgtgagtttttaaagtagttaacttcattttg

SEQ ID NO: 3355 - DNA, 333 bp, Lilium asiatic
atcatggcttactctctctacccactttctctactcctcctcctcgccatctgcgagggcaacgccatcccaacggtgcgacaggctcggcgactgatgcatcgtcggaggcataacggacatcccaaactgttgccaccaacaaggacgtgcatgacctcggccgcttctccgacgatgagcacaacaagagcgtccttcaagccaaccccagcgcctgcgtcctctcgcttgttcgtgcggtggaggcgcagagacacgtggcgaacggcctcaagtacttcctcacgatcgccgccaccgacggtcacggcaaggcggcgacattcgatg

SEQ ID NO: 3356 - DNA, 364 bp, Lilium asiatic
gatgacaaccagctgaggttcagccttttgtgtctggcagctttggaggctccgagagtcctgaatctcaataacagcgaatacttttctggaccatatggggaagatgttgttttcattgctaatgactggcacaccgggcctctttcatgctacttaaagagtatgtaccagtcagttggcatttataagagtgccaaggttgccttctgcattcacaacattgcctaccaaggcagattccccttcgctgatttctcacttctcaatctcccggacaaattcaaatcctcgcttgatttcttcgatggatatttaaaacctgtgaaggggagaaaaatatactggatgagggctggaattt

SEQ ID NO: 3357 - DNA, 430 bp, Lilium asiatic
atcacaaatcatgtggacaaggagccaaaatgtgacatcagtgccgaagaagctagagagtataattgaggtcatggctaccactgggaagttctggcatgattgggatatgctgaagattatgctatcagttcgactgaaacaggtcttctctgaatatcctgaatctcagatggtaagtggagatgttccacaacagacttctttagcagggcaaacatatcaagatacagtaagaaggttggatgaagctcttttaggatttatagagggccctccttttacattgcagaggctttgcgagatattgctgactccaaaaagtacatacaaaagtctctcaaaacttgctttggctttagagaagaatttattggtgacatccaccttgactttatgcactgacccgtaccccacagctccagtacag

SEQ ID NO: 3358 - DNA, 422 bp, Lilium asiatic
gagcaattcatgctattcgatccaatggaaatggtctaaaacatgctgtgctacaacgatcggcgagtcttaagttcaggtgcacggccgacagtttttcgccgatttgagtctgcttcgactgctcgtttggaagaacatggatttgaaagcatcacagtttcagacattctgaaagctaaaggcaaaggtgctgatggatcttggctgtggtgcactacggatgactctggttatgaggctgtgaaatctatgactcagcacaatgtaggagctttggtgggtgtaaaacctgcaaaagaaaaatcaattgctggcattattaccgagagagattatcttaggaaaatcatcgctcacggaagatcatccaagtcaactaaagcgggggacatcatgaccgacgagaacaagctgatcac

SEQ ID NO: 3359 - DNA, 403 bp, Lilium asiatic
ccctaattgagctcgcgatcggattcgaggaggaggagcgatgtcggctggaggggaggaggacaggaagccgtcggccgccgctgatgcggggaatcatatcaatctcaaggtcaagggacaggatggcaacgaggtgttcttcaggattaagcgccagacccaactgaagaagcttatgaatgcctactgtgacaggcagtcagtggacttcaattctattgcattcctttttgatggtcgcaggctgcgagctgagcagaccccggatgaacttgagatggaggatggagatgaaattgatgccatgctgcatcaaactggtggaggaggtaatggtccgtgacatctgtagttttatttttgcttaagactctgtaaagtcttaattatgccttgtatg

SEQ ID NO: 3360 - DNA, 347 bp, Lilium asiatic
gcaagaccagcagattgataatgcactgctagcggaggggcgattctactctgatcgggaactgacagaaaaggagatggagcgaatggttatggtagcttcacgagctgagtatttagcggaagacaagttgaagcaacaacatagagaatcttcaacatcaggcgcagaaccatcatcatctggggcaacaacaggatcatcacattttatactggagggtggacgagataaatcggtgctgcctgacatggtgctgagtagcagcatgcagacggttctgtcgatgggcttcagctatctacaggtcgtaggagcatacagcatatttggtgatgatgttgatt

SEQ ID NO: 3361 - DNA, 429 bp, Lilium asiatic
cccacgcgtccgcggacgcgtgggcttggaagtcacatccacattccgaaacttccggactggaagaaagataagaagaagaaaagcagtaaaaccggaccaatcttaccctacttcaacagcacgaggggctacaaccttgttgataataaggaggatcttggcaccaaggtgacaagcatttttcagaatcctatgatccacgatgcatttacgggcatgggcgagtaccgcaacctagtggtcccagatgggaaattcgggctcggattcaggaggttcgaatcgagctctggccagatgacgagtttcgggcattctggagttggtgggtcaacaggcttctgtgatgtcgagcacaaatttgcgatggcaattacggtgaacaagatgtcgcttggcggtacgactgcaagaataattcagttg

SEQ ID NO: 3362 - DNA, 419 bp, Lilium asiatic
cggacgcgtggggcagatgaagcccaatatcaaatggacggggctatccttgatggaagaaagttatcagttgtgtttgctgaggagaatagaaagaagccagatgagatgaggcgaagagaccgaacacggtcccggtcatatgatcgtcgaaggtcgtcccgctactctccttcacctaggcgctcacgctcctggtcttcacgtgacagtagatcgaggtcccgcagcccagcttaccattctccatcatcaaggcaccgccggtactcaaggtccgtgtcgcctcggggtaggaagtcctaccgttccccctcagcacgtagatcaaggaacatgagcaggagcccatctgatgggctactccgaagtcggcggtcacacaggaaaagatcagtgtcaggaagtgagtgaatcaa

SEQ ID NO: 3363 - DNA, 388 bp, Lilium asiatic
caattctctcagatctctcactaatggcgcccaaggccgagaagaagcccgcggcggagaagaagccggccgtcgaggaggagaagaaggcggttccggcggagaagaagcctgctgagaagaagccgaaggccgggaagaaggtcccggcctccaaggagggggcctctgacaagaagaagaagaggtcgaagaagtcggtggagacctacaagatctacatcttcaaggtgttgaagcaggtccaccctgacatcgggatctccagcaaggcaatggggatcatgaacagcttcatcaatgatctctttgagaagatggctcagggagtccgccgccttgctcgctacaacaagaagaacaccatcacctctcgggagattcagac

SEQ ID NO: 3364 - DNA, 426 bp, Lilium asiatic
cgggaaggaagaaggtccgagagccgatagaggagaacgtgacgctcggtccgacggtgaaagatggggagcacgtgttcggcgtcgctcacgtgttcgcatccttcaacgataccttcattcatgtcacggatctgtccgggagagagactcttgttcgaatcactggtggtatgaaggtcaaagcagacagggatgagtcatccccttatgctgccatgcttgcagcgcaagatgtcgcacagagatgcaaggagcttgggattactgctctgcatattaagcttcgggctactggtgggaataagacaaagacccctggtcctggtgctcaatctgccctccgagcgcttgctcggtctggaatgaagattggccgcattgaggatgtcactccgatcccaactgatagcacccgccgaaagg

SEQ ID NO: 3365 - DNA, 305 bp, Lilium asiatic
attcgtggacgcatctgcaatgggactgcaatcttatatgctatcagagttgccgcaaaacagggtgtaaaaagatatgtgttcgagtatcaactgctgattttggtttggcaaactatttgatgcaagggtactatgaaaggaagagagctgctgaggctgaactgttatcaaaattcacatatggaggcgtaatactcaggcctgagtttatacatcgaactcgacgtatcctgagcatgaatattcctctgggagttattggctcgtcactggagatcgttctttagaactccaagtcactg

SEQ ID NO: 3366 - DNA, 398 bp, Lilium asiatic
gggagctgcatccatcgaggttctgcgagaaggatctgatcaaggtcatagacagggagtgcgtgttcgcctatgctgacgacccgtgcagcgccacttatccactgatgcagaaactgcgtggggtattggtggagcacgcacttgtcaatggcgagaaggagaaggaagtggggacgtcgatattccagaagatcgcagctttcgaggaggagctgaaggtgaccctgccgaaggaagtggagggggtgaggatggcattcgacaacggaaccaatgtgattccaaacaggatctccgagtgcaggtcatatccgctgtacaggtttgtcagggaagagctgggggctggatatcttactggcgagaaggtccgatcgccaggggaggagttcaac

SEQ ID NO: 3367 - DNA, 413 bp, Lilium asiatic
  modified_base (369)..(369): a, c, g, t, unknown, or other
  modified_base (402)..(402): a, c, g, t, unknown, or other
ggatgtggtatgtatcctgacttggctgaggggagcactgcctctaccactatgatcatggggtttgctcctgccaagggggagtttgaggggtttgagatgtatgctgagaatggtggctgtggctgcaagtgtggtgataactgcaactgcaacccctgcaagtgtggcaagtgatctctccatggagaagaggatgtagggtttgataccctttgtttacttgtttctgctgtagtgctgaataatggccatgggtttatatgatgcaagtctttttgcaccatgagtggttgttcaccagtggcttagtgtcttgtggtggtgctgtgttggctttgtatggtctgttgaaattactgaagtgtntgttttagtggtttatctaaatggaatattatngagtaattatc

SEQ ID NO: 3368 - DNA, 333 bp, Lilium asiatic
cttggggggggagattcggggaagggattctcgcccatttggattctacagagctgaagaagaaagttgagagtagcatagacttgccagagcgagaagcggttgttggtaatgatcgggcgagaggttaattttactaggttacttttatataagagtcgcgtgaaagttttttcgggtaactttaggtgttgtcgtttatttgttcgtgacggtattgtatctatttcttgagatgaatgacaatgttgtttgtcaataacagtaagtttgaaatatgtaagttttcttggtttcctttttctgtggtcataaaatgtagtatgggatctc

SEQ ID NO: 3369 - DNA, 409 bp, Lilium asiatic
gcagatgtaatgcctgtcgaaagcgtgtcggactgaccgggttcagttgtaagtgtgggaatgtcttctgtgcgatgcaccgctactccgacaagcatgattgcccttttgattaccggacggcaggtagagctgcgatcgccaaagcaaaccctgttgtcaaggccgaaaagcttgacaagatctaatgatgctctgcagagaagtttgctgaactcttatttgatgcttctcgttttacatctatgcccctttcttttcattggagtctctttgactgattgtcttcgttggagtcttgttatcactataaaatggaggcaatgatgtaggggcatccttgcagccccaagaaccttatgttgttgattggaaaaggtttgtatgttggcaccagtgtgttaacttt

SEQ ID NO: 3370 - DNA, 353 bp, Lilium asiatic
ggcttgaagatctagatgataatatattttcaaaataaataaaaaacaggttgaccttctgttgatatgtgggcctaaaacgttatatatgagactgataaggactcatccaatacaacttgagctttccttctcctctttatttcttatctattgtctagagtttgttaagagtcttagagcttccttctctagttttagagagagagagagagagtgagtgatctataatcattgaaccctagggagatattgctaagaggtaatacatattgtagcgatgacaaatttgattttaggaaattatgatcaatatgatccttggtaataaattggtagttatgagttgttat

SEQ ID NO: 3371 - DNA, 423 bp, Lilium asiatic
cccacgcgtccgcccacgcgtccgcaagagtgtttctggtgaggaacatcgtcgagcaggccgctgtgagggacgttcaggaggcttgcgtttatgacggatacactcttccgaagctgtatgcgaagattcagcactgtgtctcctgcgcgatccactctcatgttgtgagggttcgttcccgcactgacaggaggaaccgtgagccgccacagcggttcagacgcagggaggataccccaaggcctgcaggtgggccgcctggtcaaggaccaccacgcccagccggtgctcttggagctgcagttcctgctgcccgttgatgatcagtgttttgttgctgcccaatgatgatcagtgttttgttggaggcttgtttgtcagttttgcttttatccgagtcggttacttttacaattctat

SEQ ID NO: 3372 - DNA, 409 bp, Lilium asiatic
  modified_base (343)..(343): a, c, g, t, unknown, or other
gaagcatatagatacgcttgcaatattaaatggctcggattgcgtggagatgatctgcagcttatacctcagcagtcatttgtgccattgaagccacgtgacctacaaattgctaaaagcttgatgtcatctacattgttacaggaaacatacagagcagagttggcatcgatggttgagtcaggccgtcgggcagaaattgaagcactatactaccatggttttgattttttgagaaaatatattgcgaggaagatagtacagtctgattatatctaatatgaggagagacaccgaaggaatgaatatggcaaaggtctgatgtatagcaaagttgttcggngaaagaactgaacatcattctcattaacgcttatggtctttccattgttgtctccattactatctc

SEQ ID NO: 3373 - DNA, 313 bp, Lilium asiatic
ccacgcgtccgaaaaaaaaaaaaaaaaaaaaaaaaaaaaaaaaaaaaaaaaaaaaaaaaggaaaaaaaaaaaaaaaaaaaaaaaaaaaaaaaaaaaaaaaaaaaaaaaaaaaaaaaaaaaaaaaaaaaaaaaaaaaaaaaaaaaaaaaaaaaaaaataaaaaaaaaaaaaaaaaaaaaaaaaaaaaatttaaattaaaaaaaatatataaaaaacaaaaaaaaaaaaaataattataacatgttggatttaataaataaattgtcattggctaaaattataaaacaattgtttttttcaaaaaatgtatttat

SEQ ID NO: 3374 - DNA, 409 bp, Lilium asiatic
cccacgcgtccgggcaacgaaagctttccagcttccctcttggatcttcctgctgtagtcgaatcctataaaacttatgacgacaatgtgctaatcaaaacagccgatatcggacagattataatagtaaacgaggaaggcgatcccgctcctgaaggggttgagtacaggcatggcatcacccctccaatgagggatgctcgcaggaggcgattccgtcgagaacctgatctaaatcctgagttggtccaacgggtagagaaggatctactgaacattatgtctggggcgactgctcgggcagctgcggtgaagccagatgttgttcggacggaggctgctgcgccaagcggggagcctgaaagaagcgactcagacgagtcgctcgaaacctgaaaattagagagat

SEQ ID NO: 3375 - DNA, 409 bp, Lilium asiatic
ataaagctcggcttacgcattatgatgaatacgaagctcgagaacataaacactgagggagaggtcaatcaatttaggggagttaataaatgtccggattgggattcgaagaacaaggcaggttgagaatgtgaataaggttcaggcacatattaggtcctcctgggctataaatagggaagccgcattaagcataagaacaagtgatgagctgtgatcaagaatacttgcatccacctaattttcgctcatgaatcgacgtttagcccctgtaccttgatagatcatatgtcatagctgtgatcaagaaaatgtccaaggcgttccacggacttaattacaatgtgcttcagttctacattcatagagtccatattgatagtgcgtgaagttataatgaattaccata

SEQ ID NO: 3376 - DNA, 383 bp, Lilium asiatic
atttagggttcgtgattccactgaattactgccgagctcgtggtgatagacgacgatggcgaaccctaattcggggacgccggcgaagccctccgacgtctctttcaagcgcaagcgcgggatgttccagaaagaccttcagcacatgatgtatggatttggtgatgatcagaatccacttccagaaactgttgcacttttggaggacattgttgttgaatatgtcactgatttagtgcataaagcccaagatatctcatccaagaggggaaagatcttgactgaagatttcttgtacctaatgcgtaaggatcctccgaaactgcggcggtccacggagctgctatcgatgcacgaggagcttaaacaagcaaggaaagctt

SEQ ID NO: 3377 - DNA, 447 bp, Lilium asiatic
  modified_base (19)..(19): a, c, g, t, unknown, or other
  modified_base (39)..(39): a, c, g, t, unknown, or other
  modified_base (123)..(123): a, c, g, t, unknown, or other
  modified_base (243)..(243): a, c, g, t, unknown, or other
  modified_base (440)..(440): a, c, g, t, unknown, or other
cgtgcctcttacgacaagngaggtgtatgaccacgttgnttccagcggtaggtgccctgacgagttcagtatctcggcagcgaaccagtacctgggtcccccaatcacccatactcggagtcntttaggcccttccaactgagaagggagtcgtgctccggcatgtggtcccgatctccggatgagttcatacggtgcctggagccagaaggtgtggtatccgcccgcttgaggacgtggagnaagcctcatagcgcctacccagtaagcaagattagggaaaacctcataataataataagaggatacattggtatatgtatgtatccggttgatgatgtgtgtctgcgttttgtatgtgtgatgcatgatctttaaattttatggacccaccgaatgttagaactgctgatatatcgcgcttattatgaactcctggntagaact

SEQ ID NO: 3378 - DNA, 355 bp, Lilium asiatic
ccacgcgtccgcggacgcgtgggacagccgcaccctcaacatctgaaagagcaaccgtcgccggcgccgcagaatgccgggcccgatcgtgcagaacgccgaggaggaactcaactccctcagggaggagcagaacctggagaaccaagaggatgatgcccccatcgtcgaggacgcgaaggacgacgatgacgacgacgacgatgaggacgatgacgaaggcgaccaattaacaggcatggatgataactctaagcagagcaggagtgagaagaagagccgcaaggcaatgattaagcttggaatgaaagctgtccctggtgtcagcaaggttactattaagagagccaaaaat

SEQ ID NO: 3379 - DNA, 349 bp, Lilium asiatic
gatggaggtccttaaagccctgcaagaattgggtgtttgctggaagaagattgggcgctatagcatgaaatgcagatggtttcctagacctcctgaaagtattcctgatattaatgtacctgctgatgattctgtcattgtagaaaactttggtgctctaggaaagtcgaatgtcgtcgttaagtttgaagtacagctttacaagacgagagaagaaaaataccttcttgatctacaaagagtagacgggccccagcttcttttccttgacttgtgtgctgcgctcctcaaacagctcaaggtccagtgatgctcccttcctctgatgatgtgtaattgtatctatgtg

SEQ ID NO: 3380 - DNA, 363 bp, Lilium asiatic
cactgatgccaattatgaatctgcttaaagtgaatgggaagttggttgtagttggggtgcccgatgagccatttgaagtccctgcagttcttttaatattgggaatagatctgtgtcatgcagcatggctgcagggatgaatgtgattcaagagatgatggacgtgtgtggaaagtataacatcacctgcgacatcgagttggtgaagccagactacatcaacgtggcattggacaggatcgcggaaaatgatgtgcgctaccggtttgtcattgatattgcaggggagtctaatctctagttagcttgtgctgtagcttgaatttcatgtcgcattaacatgcatttgtggtcttctttttc

SEQ ID NO: 3381 - DNA, 403 bp, Lilium asiatic
  modified_base (346)..(346): a, c, g, t, unknown, or other
tgtctccatactgaattttggggtggtcccgcttgctgctcgagttgcatggatgtgtacgtgctccatattttggaacttctacctgtcaacaactatgagcatgtaaacattgaagttcatctagcattgttcaaggtttctgctccaaatttatgttgagggtgaatggtttcctcggccctttacattgtggttttccgtttcctggccgtctctagcttggttcacaggggtaatcctgcaggaattcatcccaaaaaagaaatactgcagatgttgaaaccctagagtatttatatttcttttctttcttgtttggattttgagtcaagagaagctttgntttatgctttgatttcgcttatatgattattctggatcattccaactggcaattttt

SEQ ID NO: 3382 - DNA, 317 bp, Lilium asiatic
gcgggattgctggcgggggtgttcccggactcggctttggcggaggtgttcccgtcgttggtgctggagtcggtggtgttggtggcttgggtgggctcggtggtggcattggaggaactagcggccttggggctggtaccggcagtggtgcaggtggcggtttactcccttgagttgggtgttggtttagttttcgtgagtaacgcatgcatgcattaggttgttgcaagggtcatggatgttaaggtttggtctttttcttggctaaggttttaagtttagtttggtgaagaattattagtattaatggctaatgg

SEQ ID NO: 3383 - DNA, 281 bp, Lilium asiatic
gcaatggctaagcttcccaccatcctgctgctcttgttccttgtcatggcctctgagatggggacgacgacggtggaggcgaggacatgcctgtcgcagagccacaagttcgaggggacctgtttgagggcggccaactgcgctagcgtctgccagacggagggattcaaaggaagggtttgcgaaggcttccgccgccgttgcttctgcaaaaccgactgtcactgatgcctgagttcttggctttaataagtaatgttggattatctgagaagaattag

SEQ ID NO: 3384 - DNA, 329 bp, Lilium asiatic
gttttacccagcatcaaccctgtccttctgccgaagaagactgggaaggagggggtggagcccaagagtccgaagaaggcggccaagtccccaaagaaggcttaaatctgtgctctgggactgttagctgtaggagaagtcttaaatctgtgctctgtgactgttagctgtatgagaagtcttaaatctgtgctcttagactgttagctgtagatataagtggtggatcagttgggcaatgtattgaggtttctagtatttgtctgtattccctgttttaatggtttagtggtaaataatgttcgccttgggtttttttgatggcgttc

SEQ ID NO: 3385 - DNA, 209 bp, Lilium asiatic
cccacgcgtccgagtcaataatgattcatgatccggtcgtggactcgttgttaccggaggcgaagatcaggttggagctatatcaatccagaggatcaagagggtaccattgattaatcaacagaggatatccttcatactttcgatatcgaggtgtctagaatgtatatacatcaattccttcgcttaaaagtacattgttttacaac

SEQ ID NO: 3386 - DNA, 141 bp, Lilium asiatic
gaaagcaacagcagcagcagtagccagttgaggaggatcattaacccttccaatatgtgaaattctactgttgaggtttataattatcatatgagtatataatataattatcatattagtatataaatgtaagtttataac

SEQ ID NO: 3387 - DNA, 307 bp, Lilium asiatic
caccgagcttgatcaacgacctcatatttctgttcgaccaattacttttcaacgctggggcaaaaactttgggaggaaagattactgaatgtgacctggtaatcacaaaattccaataattcataatgatttcgtgaactgcgtatgatccgaattcatagacagtttttaacggaatcttcttcatgtatgctttcagttctatcgctatgatcgaatttgttaatggcgtaagtgctagtcttttgtcaaatgactatatgaaacaagcttgctggacattaacctaacaaacccattttgtgac

SEQ ID NO: 3388 - DNA, 307 bp, Lilium asiatic
tcgcggagccacggtcgatcatgccaattttagaagttcggttgctgattttgtaaaagagaggtgactcatgggtacaaaatgtgacaaatggcgtagtcagcgggcttcttttgtctgatttgtttaatcgttattctggacttttatttgcgagtgtgctgtactttaaaggagaatgggaagaagaatttgatgtgtccgagacgcggcattatgatttctacctacttagcgggaggtctattgaaattactttcatgacaaagtaaaattaaccttttcttgctgaatacgacaatttcaa

SEQ ID NO: 3389 - DNA, 296 bp, Lilium asiatic
aaaaaaaaaaaaaaataaaaaaaaaattataaataaaaaaaaaaataaaaaaaaaaaagaaaaagaaaaaaaaaaaaatataaaaaataaaaaaattataaaaacatacatacaaaataaataaatataatttttaaaaacctaatttcaatacaatagccttatattttacatctacataaacttaaaaaactttgacgttacttaacttaatcgcttttcaacacatcactctttttactgtttacgtattaactatatatcccaatccattcaccttttccaacattttctac

SEQ ID NO: 3390 - DNA, 380 bp, Lilium asiatic
agcttctcttcagaaatacacgagttcgacatcgatttcaagtgctgatctgagttcgggcgtggtggtatggatgattccaatcttgatttgactgctgctgaccttattaatcgcctctccttccaggcatcacaggacatctcctccctcaagaacatggccggagagacgggaaagaagttgacctcttttgcttccagctttatcaatgatctacaagatagaatcctttgaggcgggctaaacctgatcttttcattccagacaaattgttgaaatcaactgcttgttacatcgatgcgatactttcttgacatggaaggagcttgcttgcatgttgtcttatatttatatttatcccatagagtttctttttc

SEQ ID NO: 3391 - DNA, 229 bp, Lilium asiatic
agtcaaatctcctgaaaactctcgagcaaaaacagctggtctggatgttgcgtcaccgaagccaggcagtgaaataaacttagataatgcactaccttgtagaatagcatttgagagggggaaagaacgacatttcagctttttggcaatctctagaaaaacatctggttggattctccttgcagaagagcttgccctcaagaagcagcatggagttgttcgtgtgaca

SEQ ID NO: 3392 - DNA, 407 bp, Lilium asiatic
ctggtttgggaatgaggttggatcgcagcaatctgaatcttcactattcagcaagatgctcgaaagagataccggatgcatatgagcggcttctgctggacgcaattgaaggagagcgacggcttttcattcgttctgatgagctggatgctgcgtgggccctcttcacccctctgctgaaagaattagaagagaagaaaattgcaccagagctctatccttatgggagccgtggacccgtaggtgcgcactatcttgcagccaagtacaaggtccgatggggcgatctcagttccgatcattacaaagctgatccctagtagcctgtcgagttatgttgttgtgtcgacaactgtaagcctctgattcctagtagcctgtcgagttacggtgttgtgtcgacaact

SEQ ID NO: 3393 - DNA, 111 bp, Lilium asiatic
ggcaatatttgatacaatgagacacattcgccctgatatttccactgtttgtgttggactggcagccagtatgggtgcttttatcttaagttctggcaccaaaggggaaaa

SEQ ID NO: 3394 - DNA, 295 bp, Lilium asiatic
ccacgcgtccggttttgtagtatggtttatgggacgaggccggggaggcagtgtggtggagcacgggggagcatcagtagttgtgatggtagcattggtgatcagagtgtgtctattgcgagggatgggaattcgggggtgtcggcttcttcgttttaaagttcaacggaagatggaggcggtgatggatctagcaatattcttcatccggatccttctaggaggcccatccatgattgggagttaccgaggtagccactctccatctctttaacttctttaaaattagggtttt

SEQ ID NO: 3395 - DNA, 372 bp, Lilium asiatic
  modified_base (296)..(296): a, c, g, t, unknown, or other
ctcatggcttcctctctcttccccctctctctcctcctcctcctcgccatctccaaggccaacgccatcccaaccctcaacaggctcggcggcggcggcatcgtcggaggcataacggagatcccaaacgttgccaccaacaaggaggtgcaggacctcggccgcttctccgtcgatgagcacaacaagagcgtccttcaagccaaccccagcgcctccgtcctctcgtttgttcgtgtggtggaggcgcagagacaggtggtgaacggcatcaagtacttcctcacgatcgccgncaccgacggccagggcaaggcggcgacgttcgatgcgcaggtggtggtgccgtcgggggccaaccgggccaaggag

SEQ ID NO: 3396 - DNA, 389 bp, Lilium asiatic
gagcaattcatgctattcgatccaatggaaatggtctaaaacatgctgtgctacaagatcttcgagtcttaagtccagttgcacggccgacagtttttcgccgttttgagtctgcttcgcctgctcgtttggaagaacatggatttgaaagcatcacagtttcagacattctgaaagctaaaggcaaaggtgctgatggatcttggctgtggtgcactacggatgactctgtttatgaggctgtgaaatctatgactcagcacaatgtaggagctttggtggttgtaaaacctggaaaagaaaaatcaattgctggcattattaccgagagagattatcttaggaaaatcatcggtcaaggaagatcattcaagtcaacttaagggggg

SEQ ID NO: 3397 - DNA, 369 bp, Lilium asiatic
  modified_base (356)..(356): a, c, g, t, unknown, or other
atcacaaatttaaagacctttcagtcgatggattttgaatattttggtctgacaatgtgataggggccatcatttttcgttgttgcaacgtgagactgaaaatcttaaggctgatattgagaatatgcgtagtgagcttagatacattttgaattcacataatatcttccatggtactgtatgtatgttcctattccttctgcttatcccatcattattataaagaagctccacttttgagacaagcatgagattgacaaagtcactgttggataacgtttggatctaaagcttgaaagagggcaaggattattaaattttaagtttttgatatattttatggtcttcaaatttgntggtattatgttc

SEQ ID NO: 3398 - DNA, 372 bp, Lilium asiatic
cccacgcgtccggtagaatttgtcatggccgcaagtgcaattgctgctctcagctggagtggtgtggttctgggatccttcccgatacgggtgagcccctcgaagactcctgttcgcccgcgggcaccacgccaacctatgcattaaaatgtctcctcctggctggaagtcgacgatggtacgatatttatacacgattatacatagtgtctcgaggtacctctttttggggttataagtttgttgatgtagttgcgtattttgtgcccttccactctgtatttatagaaagggaagtcgatctgcgtgtaaggtgagtcgaaagtgaaggctttaagtttatttatccgacggttttgaagctatttaact

SEQ ID NO: 3399 - DNA, 373 bp, Lilium asiatic
cggaatttctgtcgatgagttcagagtgaacacattagttgggattccacggaaatggtgtgatgatttggtgggagggatttttaaccaggaggccccatggttgaacccccttgtagaaaaagggatcggtattctgaggaggccaccctgagaaatgatctggagaggccttgtgggaaagaagtgccttaaggaaaaaggccgacactgagatattcttgccgagaggaaagggatccagactctgggggtaccggccaccagaaggagacaaacttcggttctgtttctgttgatgacggtcagtacacaatggttggtagagagaatgatttagatgcttttgtaaatgaactttcgttactgactg

SEQ ID NO: 3400 - DNA, 381 bp, Lilium asiatic
ccacgcgtccgcttcggtcacagcgcttccgcgtttcctgtgctgccaaagtcgagactgtgcagaaggtatgcgagatagtgaggaaacagttggcgctaaaagacgatactcttgttactggtgaatccaagttttcagattttggggccgattctcttgacacggttgagattgtgatgggtcttgaggaggcttttgagatcacggtagaagaggacaatgcacagagcattgccacagtgcaggatgctgctgacctgattgagaggctcgtggaagctaagtagagtgaaattaataaggacgtcaagtaacattttatttatatttttcagagtctggttgacttgatttcggagtctgatgtttggcatttat

SEQ ID NO: 3401 - DNA, 336 bp, Lilium asiatic
cacgcgtccgcgcacgtacgcttcgaccttttcgcttacgactttcctgtgctttcaacggacatgctgtactgaaagtatgcgagataattattaaacagttggcgctaaaatactatactctatatactgaatattccaatttttcatatatacatcccgaatctatatactatcttgacattgacataattcttgacgatactccttacatcacactagaaattgacattacgcagatcatttccacaaaccagcatgctactgacctaattgatagactattccaatctaatcatagtgaaattaataaggacctcaaattacattttatat

SEQ ID NO: 3402 - DNA, 424 bp, Lilium asiatic
cggactcgtgggctcctccaccgtttatcccagcagccatgtcgtccaagcaaggtgggaaggctaagcctctgggagctgccaacgtcgagaagaaggaatacgatgagaatgatctagctaatcttcagaagaagaaagaggaggaaaaggcactaaaggagttgaaagctaaggcagcacagaagggggccctaggaggctctggtctcaagaagagtggaaagaaatgagcacgataatgcttattctatcatgtagtaactgaagtatctcctgacttcgttaactcaaatatgcgttgtagtgtttaaacattatggtcctgcttatgccttgctattaaatgttgaaatcctgattggtgtgttatgaaatcactaaagtattgaatccagctgtagtgcgtgggacttcattacca

SEQ ID NO: 3403 - DNA, 381 bp, Lilium asiatic
ctcaattcaatatctgcctttcaagatgttttcccaagctcaccctcatgaagtgcgatatcaagaatttcagtattttgttgtgatcgactttgaagcaacttgtgataaggaaatgaacccaaaccctcaagagatcattgagttcccatctgttatagtgaacagtgcaactgggcagttggaaagctactttcaaagatacgtgcgacctgcctataatcaacatctcactgatttctgcaaagagctgactggtatacagcaaactcaggttgacagcggtgtttctctaagtgaagctctactcatgcacgacgagtggctcgaagcgaaaggaatcaagcacaagaatttcgcagtcgtgacatggtctaactg

SEQ ID NO: 3404 - DNA, 347 bp, Lilium asiatic
cccacgcgtccggaaattccgagccctgcaccggcttcccatgctgaatcaaaagaggcgaagctgcagagtaagacttctgcctcatctacagcagagcatgacctggacatgtttcttcttggagatcttggaagcagcgatgagggtccagatgatgatgttgatgcatttgatgatgattttgataagacggggaatgcctcaggattagacagtgaggatgatcacgagacatccagcaagtgaacaatactaggaaataggttatatgttttggagtaagtctgttgcagactcagtgatgtgcttcttgtccgtgatagtgacagtaatgaggttgtgag

SEQ ID NO: 3405 - DNA, 425 bp, Lilium asiatic
gcaggtgacaccaactccgaacgctacacatagttgaatgtttgatactgaaggccggaagagccatgtttgctatttcacgggatttcactagatggtaagtaaacaacatatattgaaagaaagagttggagcctaagctacagaccagatggctttttaaagtatcattgttagttggcgagaaaaaccaggtaattctgcaactgatcgagttgaactgtgcagcagtttttgctggtaagaaggggtatacaattggtggcagttttagtagatggatacagttacaatatgattggattgcatggaactttttgttggcagttataggttgccttcctacaatatttttgaataaaacatacatctgtagttgtatagcgtaatggtgttctcttatgaaatattgccgacttttgctt

SEQ ID NO: 3406 - DNA, 412 bp, Lilium asiatic
atctctcgtcacttccatcactcagatctccaaatggccggtcgtggaaagtctctgggcggcgcagccgccatcgcggcggcgaagaagagtcattccaggagtagcaaggcggggctccagttccctgtgggccgcatcgcgcgcttcctcaaggccggcaagtacgcggatcgcgtcggcgccggggctccggtgtacctggcggcggtcctggagtacctcgccgctgaggtgctggagttggccgggaatgcggcgcgggacaacaagaagactcggatcgtgcctcggcatgtgcagctggcggttcggaatgatgaggagctgatgaagctgttggggaaagttaccattgctagcggtggtgttcttcccaacataaacaatctactgctgccgaagaagtatg

SEQ ID NO: 3407 - DNA, 259 bp, Lilium asiatic
cccacgcgtccggatttggttcggaattccgctttgctgaccgtccggaaactagggctgcagaccccttcgcagctgcgtctgcagcagctgtagatgaggatgatctatacaattagtgttttttagtgactttgtcagactacttgggataatttaagggtctttgtgaagtttatttatctgttacgaccacaggttgtaatagagattgaaattaattgctctgctataatgttgaagtttaaaactttatttt

SEQ ID NO: 3408 - DNA, 403 bp, Lilium asiatic
cttggattttcgccacttgaaccatctgttcttcgagcttatatttcagcagcgcgaaaagtaatcccttctgttccaagggcgcttgaggaatacatatctactgcatattctagcattcgccaggatgaagccaaatcgagttcaccgcattcttacacaactataagaacactgctcagcattcttcgtatatctattgcactagcaaggcttcgcttctctgactctgttgctcagagtgatgtggatgaggcgttacggttgatgcagatgtcgaagttctcactgtactcggatgatcgacagagatcgggtctagatgcaatatctgatatctattcaatcctgagagatgaagctgctagaataagtaccatggatgtgagctatgctaatgctc

SEQ ID NO: 3409 - DNA, 75 bp, Lilium asiatic
gcagtggatctgaatgtatgatatcaattcttcattgaatttcgggattcgtgataggaattcttcattgcactt

SEQ ID NO: 3410 - DNA, 375 bp, Lilium asiatic
agccgtttcttctgtctcctacaatctatccgcacctaattttcttgctacaggttcgaacagataaaatggtgaaactctgggatctgtcgaacaaccaaccgtcatgtgtcgcatcgagaaatcctaaggctggagctgttttctcaatttccttctcagaagagagccctttcttattagccattggaggttccaaggggaggctggaagtctgggacaccttgactgatccaggagttgtccgcagttttgggaagtacagcggcgaaaagaggactgcaatgccatcatcttcctgagctttgaactctggtgtttcacaagagaggagagtgcaattttgagttaatgtatgcaacatgttggtccgtc

SEQ ID NO: 3411 - DNA, 367 bp, Lilium asiatic
ggactattaaagggcgagtgagcggactgtcgaacgaaagcttgaagataaagagagagtgagctagcccagaaaatcacatacgccctcatacctgcgttgcttctggtctcgaaaacaaagctgaccacctcactacttatcttctccgtgtactggcaaatttatgggtttttcaaggagatctttctggattacgttcatcaggaagtgactcgcaagtgggtcttggtctacttcaagctgatgctcctcattctggccaaggacatgtttgttttgtttggtttggtgtaagctctgttgttgtgacatgtgattttcttttatgagttgggagggttttgtgatgaggttgaatgttggg

SEQ ID NO: 3412 - DNA, 85 bp, Lilium asiatic
ctaatgtgtttttcctaagacaatttcaatggatgggtatactttcatagttttgtgttgaaattttagtggttacttagttttt

SEQ ID NO: 3413 - DNA, 382 bp, Lilium asiatic
cccacgcgtccgcccacgcgtccggccccatggtgatgctgggctcaccgggcgcaggattattattgacacctatggtggctggggagctcatggtggtggtgccttctctggtaaggatcctactaaggtcgaccgtagtggtgcctacattgtgaggcaggcagctaagagtattgtggccaatggccttgctcgtcgctgcattgtgcaggtttcctatgccattggtgtgcctgagcccctgtctgtgtttgttgacacctatggcactggcaaaattcccgacagggagatattgaagattgtgaaggagacctttgacttccggcctgggatgatgaccatcaatcttgaccttgagaggggtggtaatgacagg

SEQ ID NO: 3414 - DNA, 324 bp, Lilium asiatic
acgcttccgcccacgctttcggttttatggtgatgctgggctcaccgggctcagtattattatagacacgcggtggggcgctgagagctcatggtggtggtgccttctctggtaaggatcctactaaggtcgaccgtaatggtgcctacattgtgaggcatgcagctaatagtattgtggccaatggccttgctcgtcgctgcattgtgcatgtttcctatgccattgctgttcctgagcccctgtctgagtttgttgacacctatggcactggcaaaattcccgacaaggagatattgaagattgttaatgatacctttgact

SEQ ID NO: 3415 - DNA, 365 bp, Lilium asiatic
ggcgccgacgcatccgatccggttggggctggcgctgaacttctcggtgggttactgggagatcctgaactcgcctgatagggcttgcaccttggcgaagcaggccttcgacgaagcgatcgcagagctagatactcttggagaggagtcttacaaggatagcactctcattatgcagctcctccgtgacaacctcaccttgtggacctcagacatgcaagatgatggaagtgacgagattaaagacgcacataaacatgaagatgaacactagcaacttgaagaaatgacaggtgctgatctctgaagtattcctagattgaagtatgtctcatagatattcactcaattgatcatgtcataat

SEQ ID NO: 3416 - DNA, 302 bp, Lilium asiatic
ggcgccgacgcatccgatccggttggggctggcgctgaacttctcggtgttttactaggagatcctgaactcgcctgatagggcttgcaccttggcgaagcaggccttcgacgaagcgatcgcagagctagatactcttggagaggagtcttacaaggatagcactctcattatgcagctcctccgtgacaacctcaccttgtggacctcagacatgcaggatgatggaggtgacgagattaaggacgcacataaacatgaggatgaacactagcaactggaagaaatgacaggtgctgatc

SEQ ID NO: 3417 - DNA, 354 bp, Lilium asiatic
gccgctccagaaatgtttgataccatcttaagtaggcttcgtcctttatatgctcatgccaaagagctctctgaaaatgaagtaagtgctacgacgacattaatggggcagttggatgctttgctacaatctggacattcagctcctcagcggaaaaagatagatgagcagaaaaagaagcggatgaagcctgatgcagacttaattaggtttcctcctactgcatctgtgagaagccaatttgagcatgctgctagcttgaagggagagcaggtagcaggtaggctcaagctcgatgacgacgagaaagatgagtggtttgttgtgaaagtgattcgttttgacaaggatgca

SEQ ID NO: 3418 - DNA, 426 bp, Lilium asiatic
  modified_base (81)..(81): a, c, g, t, unknown, or other
cgaaaatatgatcgcttgcggaaagagagagaagaaaagaaagctgagcgagagaggcagcgtcgccgtgctgaggctcangctgcttatgagaaagagaaaaagaaagaaaaatcttcttcaaccagaccatcagctggcatgcccggagggtttggtggaggcatgccaggaggcttcggtggaggcatgcctggagggtttggtggaggcatgcctggagggttcccaggtgctgcgcctgggggcgcccctggaaatatggatataaccagtattctgaatgatcctgaactcatggcggcgtttagtgatccagagattatggctgctcttcaagatgtgatgagcaacccggcaaatattgcgaaacaccaatcaaatccgaaggtggcacccgtgcttgctaaaatgatggggaaattc

SEQ ID NO: 3419 - DNA, 412 bp, Lilium asiatic
cacgagcagggaactcttcaccctcatgaggacgtagaagaacaaaacggcgacgcccaaatacacgaagcatgtcaatagcgtggaatgtgagagtaggcttgaatgtggggtgtagcaccaccaagatcaccggatggtattatattgatgacaagcacaatggtgagtactgcctcggcccaaaatgtaggaggaacaaaatctgaataaataggcatgactagtgtctagattataatgatgcttgtgcttagtaaaatcgttctgttcctagttaaaacagtgtcatgataggaaagctgagtatgcatggtagatgacaagtactcacgggcacagtcggacctgaaatccttgatttgagcctgacaatgtgtgatgaaagtgaagttttcgtagacctggggaa

SEQ ID NO: 3420 - DNA, 377 bp, Lilium asiatic
attctcaatggcgaaatccagaactcctccccacctcctcctcgccaccgccctccggctccggctcatctccggcggctccgccaccgaccacatcgtcggcgcccacctcggctggaaccccaacatcaactactctatctgggccgacaaccagaccttcttcgtcgccgacctcatctccttcaggtacacgaagaacacccacaatgtcttcgaggtcaacaagacggggtacgataactgcactctcgacagcgccgtcgggaactggagctccggcaaggatttcatcctgctcaatgaggcgaagtggtactacttcatctgcgggaacgggttctgtatgagtgggatgaaggtggcgattcgggttc

SEQ ID NO: 3421 - DNA, 206 bp, Lilium asiatic
ttacatcattcacatctccatcaaattctccaatatttcgctctcctgcataccagcatattttaattctattacggcaactaaaactacattacttatccacatcttacaacctatcaacatcacaaacccttccttttcccaacttaaacatctttcaatacataccactttcatcatctatacatataccaaataatccctta

SEQ ID NO: 3422 - DNA, 388 bp, Lilium asiatic
cttagttcattcagatctcgatcaagatcggtttcatctcgctctcgtggaagtccggagaaccaaagccctccacgacgaggcaaacgacttagttcattcagatctcgatctcgatcaagatcagtttcatctcgttctgggtccgatggaagcactccctcgggatcacgatcaagatccatacctccttcgacttctcccttgtggggaaaaagagtgagcctaagtccgaaggaacagagtcctaggaagaacaggggcttatcagcttctccatgaaaaaatgtgactcctaatggctgctgaagcgatggacttagttatgtcatgttgttggacaaattgtagttttatgcttttgcagtctgagttgagaggatttaaa

SEQ ID NO: 3423 - DNA, 311 bp, Lilium asiatic
cggacgcgtggggactccccatcgccatagcggtgctcatcttcgccatcgccctagctgccgcacaggcacaagcaccggctccagcgccgaccagcgacggcactacgatcgaccagggaatcgcatacgtgctgatgctggtggcgctggtgctgacatacctgattcatccattggatgcatcgtcgccgtacaagttgttctgatatttacattgtagtagttgttgtgaagtttgtgtttgtatctggggtttgggtgggttgtaactctgaagtttgcttttagatgatgagaaatttattctg

SEQ ID NO: 3424 - DNA, 423 bp, Lilium asiatic
gtttgcctgcttgctagcaggaaatggatcgggattcgggttctggttgttcaagctgaccaccgtatgctatcactctatgtatctaccccttctttatgtgacatttttagcagatttttttcaggaggaggatttacgcttggaaaatgtttactactcggagatgaaagatgctggcttctttgatgctgattgggactagaaatcacccttgggtgtacaatcgctgcactttgatcgtggaagcatttcattatgcttatgactcgccagacccatgtaaataagctcatttccatctgtgttaactgtttggtaccagatctgtatctatacattaaccatagaaatcagactacatctactacattgaatctgctagtagtgtccatttcagtgttcacaatagagggggcaacc

SEQ ID NO: 3425 - DNA, 391 bp, Lilium asiatic
gagagcaacaatcaatggaggtgatgatgtcttcatcgtcgaggctgaacccgcacgcagcgccgttcgtgccgtgggcgtaccgggcggtggaggactactcgccggagtggtggagcatggtggagtcctcggctgggttcagggattactggctcagagagtgcttccacgaggaggatgttgaagttgatgatgtttgtgagagcgtgctgccggatgcggattctctcttccattcttaccctctctactctaaggaggaagaggtgaaggatcgcaagagtggtggatgggagctgataggctggggcgcggagaagtggcatgctgcttcggggcgggccttgggtcccaagtattttgagaaggcacccaaaattgtgaacat

SEQ ID NO: 3426 - DNA, 287 bp, Lilium asiatic
cggacgcgtgggcggaggcatacttggttggtctgtttgaggacaccaatctgtgcgccatccatgccaagcgcgtcaccatcatgcccaaagacatccagctcgcccgccgcatccgtggggagagggcctgaattgtctctgttttctgcgtgatccttcttgtctgttctgtggttatggtcttgttgctttattgtaatgtagcagcagtttctactatctcgtagaaaagctacaatcttgtttggcagtttatgcaatggaacttaagagaagttgttctt

SEQ ID NO: 3427 - DNA, 323 bp, Lilium asiatic
cgacgcgtccacttaccgacggagtttagatgtactgccagagctctcaattcatggcatgggttatgtactgcatcggtacactaacatgttgaatcggataataatggttcatcatctggctctgtgctgcaaagatattacactggtactctgggaaactgctacagctatccctctaagcattctctatcgtaaaatgctagtgtacgtttaacttaagctcgggtagcttctattgtgattcctattcttctagtaataaaagatttggtttccattatcttttggtttatcactattctgatctttcgtgataagcg

SEQ ID NO: 3428 - DNA, 314 bp, Lilium asiatic
  modified_base (264)..(266): a, c, g, t, unknown, or other
  modified_base (272)..(272): a, c, g, t, unknown, or other
  modified_base (281)..(281): a, c, g, t, unknown, or other
ccacgcgtccgctttcgactagcttggcttacctctttgctacggtccctgaggaggaggctgaagaggaggagactgttccaacagtagtgtatgagcacgaagacagtgatgaagagtccgaagttgtaatggaaaccgatgaagatagcgaactgggatccatcatcaactctcctcaacaatctgatgatggtgaagtcatgagcgattaatggtcgacttctactatgctgagggagtgtggggtgactgtaatagctnnnattgtntgatacatntggtctgattaactgctgatgtaaacacagaaa

SEQ ID NO: 3429 - DNA, 385 bp, Lilium asiatic
  modified_base (353)..(353): a, c, g, t, unknown, or other
gaacaacttaccgagcaatgctgagaatcatcccaatgctgtgaatggcatgcatatcgagttgactcctgcgagacaagaacatgttgaatctgagatgaagggaagctcatcttgctctggtgttcaggaagaggataggggtttgttggaagagtcagttgtggatccctggatgcatagactatctcaagatgctgctgtccaggaggcgaatgtggggggtacattttcggtgatgccaaatactggaagactgcgatcgtgagtagcgtttgatggtatgatttccattttcttatctgatcgtatgatttccattttcttatctgatcggcctctgggattcatcngttggagatttttgagaatatggtggatgtgc

SEQ ID NO: 3430 - DNA, 430 bp, Lilium asiatic
  modified_base (378)..(378): a, c, g, t, unknown, or other
cccacgcgtccgagattattctgttaataatattttcacagtacataccccaagttgtacattctgagaagcctgtcttcgatcggttcgccgtcttatttacagtggctttagtatggctttatgcatacttactgactgttgggggagcatacaaaaatgcgccaccaaaaacacaattacattgccgtactgataagtctggcctcatcggtggaactccctggatacaagttccatatccttttcaatggggaccaccatcatttgatgcgggtgaagcttttgcaatgatgattgcctcatttgttgctctcgtggagtccacgggtactttcattgctgtttcaagatatgccagtgcgacaccattgcctncttctattctcagtcgccgtattggttggcaaggaatgggtatattgataga

SEQ ID NO: 3431 - DNA, 234 bp, Lilium asiatic
cctcctctgccttccctgtcacccagaagcctgccaccgggctctccacccttgccagcaacggcggcagagtgcagtgcatgaaagtctggcccatcgtggggaagaagaagttcgagaccctctcctaccttccaaccctttctgtggagcaactgctcaagcagattgagtacctcatccaaaacggatgggtcccttgcctagagttcagtctggatggatttgtgtccc

SEQ ID NO: 3432 - DNA, 346 bp, Lilium asiatic
caggttcctgctggcatacaaggaaacactgcaaggaacgcaaacaactacttcagagctgatggccagaatactggcaacttcctaacggatcgtccttccaccaaggttcatgctgcacctggtggtggttcctcccttggctacctttttggtggcggtagcaactgatgggatttctatgctgctttagaactgcaccaagtgattgcagatttctagttgaagagttgcttaatcatgtaatatatacctaaggccgaggccagaaacttctgccccttggttggtgatttgtgttctctatttttctgaaaaatctttgcaagctcttgctgttcggcct

SEQ ID NO: 3433 - DNA, 405 bp, Lilium asiatic
attggatttttgctgtgctcgacggatggtcctcctgtcgacttcttaaatccagtggacccaattgagaagctggaaggagcaatcaagtctgggagggacatcaggttctataactcagagatacataaatctgcatttgccttgccatcatttgcaaaagaggaactggcggccctttattcctcaacaaccaaaggtcaacttggacaggcttatggctctgaaaggaaaagctctaaattaaagggcaaatattctaaaacctgtaaactgaactgattctatcatatgatgatgtcaggactggtagttgtcctatatagtagaggagtcttatattgtaatcaataattgaacacttgtactcttattttctatgaagtgcactttcatttatgtttt

SEQ ID NO: 3434 - DNA, 347 bp, Lilium asiatic
cccacgcgtccgcttaaaacttatacctttagtagactaatcatcgaagaagatctgaaactgttttcataactcacttatgccagagaagaagcaataaatgatgagaatattgtctctatcagctggtattctcatgatccaagaagggatcatcttttggtgcccaatgaccaaagagttagatgggtgaatgctgaaagaggaaagattccatgttacccaaagaaggtttgaaggaagatattattaaccatgatgaccaggaagaggagtatggctaatgagaagcccacaaagtaggtattttacatttttttattcatctgatttgggaacaaactact

SEQ ID NO: 3435 - DNA, 431 bp, Lilium asiatic
gcattttgaaaccactggtccagaaatatgagaggatacattgggccaagtggatatctttgtaatgggcatagggagtggaggccctgtaacgggtgacgggaaatacctcaaatctatgaaccccaatgtgaagatatacggggttgagcctgctgagaccaatattctgaatggtggtaagtcagttagcagatgaacctacaaaaatcaagactttagtacctgcaaagctctgtcagttgcagctctgacacatccacaaagatttatgttcttcaagttccggcaacaactggtcagatatgcaagagcagaatcactgaaggccgagcatccgctgatgttaaatttcataaggttggggcatccatgggctaatgcatacaaggaagaatcactgagcctaaagcttttgcaaagatctaaat

SEQ ID NO: 3436 - DNA, 391 bp, Lilium asiatic
atgaaattgaatctgctgccgagttgttatatggccttatacatgcccggtatatcttaaccgccaagggatgaaatgcaatgcaagagaagtacaagacagcagattttgggcgctgccctcgagttttttgtggaggacaatcatgtttgccattgggaacatcagatatcccacgcaatggttctgtgaagatttactgcccgaaatgtgaagatctatacttcccaagatgcaagtaccaaagcaatatggatggatcttacataggtactacttttcctcacctatatttgatgacttatcctgccgcgaaacctgcgaagccggtccagaattacactccgagggtttttggtttcaagctgcacaaggattctaggtgatcttt

SEQ ID NO: 3437 - DNA, 389 bp, Lilium asiatic
gcgtcatgttcctcctcatcgtcctcctcttctgcttcaccgtcttcacgtttgtggggaccaacaagggggctggaaaggtggtgtccgggagggggtataaggagtacaggcttggggattacaaccactggctccagaggagggtggagagtgggaagaactggaggaagattcggtcttgcttgatggatagcaaggtgtgcaagagtctgcaggcggagaaccggacgtttgcggagttcgtcaacgataatttgtcgccgattcagtctggatgctgcaagccccccactgggtgcaatttcactttcgtggatgcaaccgactggacgaagccccctggttttaccttcaacattcccgactgcgatacatggcaaaacgat

SEQ ID NO: 3438 - DNA, 354 bp, Lilium asiatic
gtttgatctccttaaggaagcttggaacaaggtgaattctgaagagctcatgtaagaccaggggatctcaatgtttgtacgagctgtcggggagggattacatggaagccatagaactagagcccattattcttttcttgtattattttttctcttttacgtgttgataatacaatggcgcttccaattctgtagcacaaccgggagaaacggatttctttacacaacaaattatgtgtattttgtcccggtttttatcatatagagctcccttttaccctatatatgtatgcattgtataacccttgttttcagatgctaaacaatgtcaatagcaatatatgttgattcatt

SEQ ID NO: 3439 - DNA, 366 bp, Lilium asiatic
  modified_base (299)..(299): a, c, g, t, unknown, or other
  modified_base (315)..(315): a, c, g, t, unknown, or other
gcagatgcggtctttgattgcataggagaccctcctgaggttcgttttgacttggcattttgtgccgatcttctccaaaaacaatatgtgagttaacatttagttcgagttctgttgtcttttaactttatatcacaaagaaagcaacagacaaattccttgtactgaatcatatcaattcttcatcagtatgtgctcataaataataactggattagtttagtgtgagagaaatgaggaatataaactacagccgtgccagttctgtatgtcacattcagtttttttgctgtaacaanttcttgtatgtgctgntctcttgccttgtgtaccactgttcactgatacaaaaaatcatttcttgtc

SEQ ID NO: 3440 - DNA, 385 bp, Lilium asiatic
gcggggcttcagttccctgtgggccggatcgcgcgcttcctcaaggccggcaagtacgcggatcgggtgggcgctggggctccggtgtacctggcggcggtcctggagtacctcgccgctgaggtgctggaactggcggggaatgcggcgcgggacaacaagaagactcggattgtgccgaggcatgtgcagctggctgttcgaaatgatgaggagctgatgaaactgctggggaaggtcacaattgctaatggcggggtgctcccaaacattcataatctcttgctggcgaagaagtccggcaaggctgctccagtcgctgatgatgacaatcgagtcgttttaagagctttgtgaaacgttaaagtgaaattatatggtcttt

SEQ ID NO: 3441 - DNA, 415 bp, Lilium asiatic
  modified_base (358)..(358): a, c, g, t, unknown, or other
cggacgcgtgggcgctcccgtcgacgagataaacagagtttaggttttctcgcttgaactaagatgggtcgtggagttagcagtggcggagggcaaagctctctggactacctttttggtggtggagaggctcccacaaagcccgctgctaaccctccagctgctgacaatgctgggactgttgataagtcctccggtgctccagctcctcttgacaacggcaagcaggttcctgctggcatacaaggaaacacagcaaggaatgcaaacaactactttagagctgatggccagaatactggcaacttcctaacggatcgtccttccaccaaggttcatgctgcacctgggtgtggtntcctccttggctacctttttggtggcggtagcaactgatgggattactatgctggtt

SEQ ID NO: 3442 - DNA, 399 bp, Lilium asiatic
ccacgcgtccgagatggtattcatactattactagtaaggatattttttttattatattcatactaatgatattaatggtaatattattaatgttgtttatattttgatctaatatttaacaattataatgtttgcaatatattatttagttgtacttgctggattagttttatctttgatattttatgtttctctatataaataaatgggatgtttaatgttatagaagaaaacatataatctaaatgggatattactgagctatactaaaataaatagatctattcagataaagcctaaacatttacctatattttacatttcttcacataggtaaccatggggaaattttttgacctaacatcctaccttattttgcctatttagaatttttgtag

SEQ ID NO: 3443 - DNA, 443 bp, Lilium asiatic
gccagcctctccttcctccgaaactgtccttcaatgaccttgaattctacatcgacctctggtctgatcaggatctgatcttctccgaagctatctcgggccccatgcttcaaactggaattaagaatccacctccggaaatacctgacattctcaaggctcatctagacgggccggattacaagatgacgatgcaggtggagccgaaattcaggattcctctcggccaggcaatcaccgtctccgtcctggtcggcaggaaggacaccgatgagattgcgtgtatcgtgaaccagtctcccttcgactatatcgatgtgagtgccttcagggcattggcctatgactacctcaacttctcagctgaccacccgtttatatctggaataagggcctgcgtgtctttgcttttcgtggcacacagcaacagcactatcatcaat

SEQ ID NO: 3444 - DNA, 386 bp, Lilium asiatic
  modified_base (372)..(372): a, c, g, t, unknown, or other
gtggtgggagtggcgggcgctttggcgggggatcgggtcgtggtgagcgctctggccgaggatttgataggggcggtcgttctagcaggggcaggggatttgataggggtggtcgctcaggctctggcaggggatccgctcgtggtgggcgtggcggtactccggtcagcactgggaagaaaattacctttggcgatgactgagattgcgcatcctttccaaaatcgatgctctttttgttagaggcgactcatgtttttgcttgtgaggataatgttgtagttctgtcttgtcttactggattattggtttatggtacttgagggattatgtgttattttgtaattcggatttggctgcttttaacggttntatgattttaaaaa

SEQ ID NO: 3445 - DNA, 376 bp, Lilium asiatic
accgatccgggagtccagccacgcgtccggcagtctggaacacgctggctcgatcggccggactgaagaggactggaaagagctgcaggcttcgctggctgaattacctgaggcctgatgttcgtcggggcaacatcacaccagaggagcagcttctgatcatggaacttcacgacagatggggtaacagatggtcgaaaattgctaaggagctcccaggacgaacagataatgaaatcaagaacttctggaggaccagagtccagaagaaatccaagaatggcgaatcctcggagggccaaatctccatgctttcagatgaaactagtgccatgcagatggaagatgtcgatgtttgtgtgtcgcagacgagcta

SEQ ID NO: 3446 - DNA, 427 bp, Lilium asiatic
  modified_base (338)..(338): a, c, g, t, unknown, or other
gagagagatgatgaacgtggaggaagaggtggggcgactcaaggaggagatagagcgtctgggccaacgccaggaggatggttcctacaaggtcaagtttggtgtactgttccatgacgacaggtgcgcaaacatatttgaagcgctggttggaacgctgagggcggccaaaaagagaaaggttcttacttatgacggtgaactgctactgcagggagttcatgacaacgttgaaattacccttcttcccaccgcagctgcctagcgactctgctgcctgaaggtcacaattgtgctatataatcatttgttatgttaaatgcctttctgcatacatntgtaaagttgtgtgtatctatcccctattagacctgcaatgacagaagcctcgggcacttggttgccttttattgtttttacgtctttt

SEQ ID NO: 3447 - DNA, 429 bp, Lilium asiatic
cccacgcgtccgcggacgcgtgggttttagaggactcgaggtggtggtgctcagcgtcgctgcccaatcccccaccgccgtgatcgtcgccgccgtccgcctccggtgagctccaatcgcttcacctccggtgatctcccctcttctaagctgagttgaagatggagcgtgattcgggagattagggtttgctttctcggcctgcggcggcggggggttcgatgggctgccttccgtcaaaggctagaaggcagttcgccgggtacgaggacccggtgcttctttcttctcagacagctttcagcgttagcgaagttgaggcactttttgagctttttaagagcatcagcagttccttggttgatgatggactgataaacaaggaggagtttcagcttgcttttgtttaaaacaggaaaaagggaaatc

SEQ ID NO: 3448 - DNA, 404 bp, Lilium asiatic
ctagcaggtgccttgtacaaggtcttcagcgcctcactcgatcaggctaggaacgaaatgcgtcaggcctgttttgattatctgagcctcggtggtgtctgctcgactgggcctgtggcgttactgtctggtctcaaccctcgtccgatgagtctggttgcgcatttctttgcggttgccatatatggtgttggcaggctgctgttgccgtttccttcgcccaagcggttctggatcggggctagactgatttcggccgcctcgggaataatatttcccataatcaaagcagaagggatcaggcaagtgttcttccctggtactgtaccggcatattacagaactcctccaacgaaagcttgaatgccaggggtcttgtagtgttgatggatctcacttatgta

SEQ ID NO: 3449 - DNA, 456 bp, Lilium asiatic
  modified_base (416)..(416): a, c, g, t, unknown, or other
  modified_base (423)..(423): a, c, g, t, unknown, or other
cgagttttggcgcaatactaggtccgtgaaatcagctattcttcattttcagcttagaaatggggtcggggctacatcaaagcacgatgtttacctcattccccactcttctgttattcattggtctgcactgagacgtcggaaatctcaagttctgaatgtttctggccatgtcgcaccctgtgagaaatacccggggaatttacgagaagggtttactgaaactcaagtttgtacattagcagttagggataagttacttttagtgggtggattcgagggtgaacttatctgtaagtatattgatcgacctggagtaaagctttgttgtcgaacaactcatgatgacaatgccataacaaattccttggagatatatgacagttctagcggtgctacacacttcatggctgcanataacgnatgtgggagtagagaatatgacgctgagaagtt

SEQ ID NO: 3450 - DNA, 362 bp, Lilium asiatic
  modified_base (97)..(97): a, c, g, t, unknown, or other
  modified_base (333)..(333): a, c, g, t, unknown, or other
ggttttggccggcgacgaagaagaaaaccctcttttccggcggagcacgagaagcgcagcgatcatgtttcttggggcgatgccgcggaagcctganaagtccactgctctcaagaagctgaagaaggaggtgtacacgatggtggcgttcgtcgccgtcatccgcgtcgtcccctacgttctccacttcctcaacaaggagaaggaggagcttcggctcgagttctagacggtcccgtagaggtttgggtttttggagttctgaaagaaaatatgccggagttgcagaatggtttatgctaatttcaggttttctcaaagttaatggacagntaagtgtaagtctggatgtattttgatac

SEQ ID NO: 3451 - DNA, 413 bp, Lilium asiatic
  modified_base (191)..(191): a, c, g, t, unknown, or other
  modified_base (402)..(402): a, c, g, t, unknown, or other
gactgtgtgagcttgggaattgcccgcagacaacaggctgcggtgtccttcgggggactgcgaggccggccgttggtgccaggatcaatttgctgtcgttctacttcgttgggacgccggtggcggtggggctggcgttttggctgaaggtggggtttggggggctctggtatggactgctgtcggcgcangcggtgtgtgtggtgtccgtcctggcggtggtgctagcaaggactgactgggaggcggaggccctgcgggctaagaagctgaccagtgtggaagaggagaaagagctgctgcctatgagggaggaggtctaatggaattattaagggagctttttaactcctaagattttggatgtaaatgattactttctcattagtgtcccaagagcanatcggggagct

SEQ ID NO: 3452 - DNA, 397 bp, Lilium asiatic
  modified_base (372)..(372): a, c, g, t, unknown, or other
cccacgcgtccggcaactctcacttcagccgttcctctccgccgccgtcgccgtcgttcccgatctagcccttacaactatggcggagacgaagcaggccccgatcacgatccgaactcggaagttcatgaccaaccgcctcctctctcgcaagcaatttgtcatcgacgtgttacaccccggtagggcgaatgtctcgaaggcggagctgaaggggaagctggcctcgatctatgaggtgaaggacgctaacgcgatcttcgtgttcaagttccgcacgcacttcggagggggcaagtctactgggtttgggctcatctatgataatgttgagagtgccaagaagtatgagcccaagtaccggctcatcangaatgggctggctactaaggttgag

SEQ ID NO: 3453 - DNA, 443 bp, Lilium asiatic
ggttttggccggcgacgaagaagaaaaccctcttttccggcggagcacgagaagcgcagcgagcatgtttcttggggcgatgccgcggaagcctgagaagtccactgctctcaagaagctgaagaaggaggtgtacacgatggtggcgttcgtcgccgtcatccgcgtcgtcccctacgttctccacttcctcaacaaggagaaggaggagcttcggctcgagttctagacggtcccgtagaggtttgggtttttggagttctgaaggaaaatatgccggagttgcagaatggtttatgctaatttcagtttttctcaaagttaatggacagttagttgtaagtctggatgtattttgatactgtttgttcaacagttcctctttcaataatgttagttttggatatcaagaattaagactgatactgtttgttaaacagttg

SEQ ID NO: 3454 - DNA, 447 bp, Lilium asiatic
cccacgcgtccgcccacgcgtccggcaagaagcgcaagttcgttccgatggcgtattctttgccgaattgaatgaagtcctcaccagggagctcgccgaggatggttactccggcgtggaggtgcgcgtcacgccgatgcgtaccgagatcatcatcagggccaccaggactcagaacgtcctcggtgagagggggcggcggattcgggagctgacctcggtcatccagaagaggttcaaatttcccgagaacgcagttgagctgtatgctgagaaggtgaacaaccgtgggctctgtgccgtggctcaagctgagtctctccgttacaagctccttggtggccttgctgtcaggagggcttgttatggtgtccttaggttcattatggaaaatggagctaaaggttgtgaggtcatagtcagtgggaagctcaaggcccagcgtgc

SEQ ID NO: 3455 - DNA, 456 bp, Lilium asiatic
  modified_base (427)..(428): a, c, g, t, unknown, or other
cgaaacctgatgttttcaagagccctgcatcagacacgtacgtagtctttggtgaggccaagatcgaggacctgagctctcagctgcagacacaggccgctgaacagttcaaggcccccgatatgagtcatgtactctcgaaggctgtagcatcatcagcagcccaggatgacgaagaagtcgatgaggcgggggttgagccgaaggatattgaactggtgatgacccaagcaggggtgtcgaggcctaaggctgtcaaggcgcttaaagccgcagatggcgatatcgtcactgctatcatggagctcaccaattaatagaaagagaatctgggagatgtttctattagtaaatggtactgcccttgttggtcaatttaagattttggctgtttattgtgacgaactgttacaaaaaagaatctctnntatttctgtgtaaaatgtatttttttac

SEQ ID NO: 3456 - DNA, 440 bp, Lilium asiatic
gttgggttctactctgtgtacttggttgctgattacgttgaagtcattagcaagcataatgatgacaaacagtatgtgtgggaatctaaggctgatggtgcctttgctatctctgaggatacatggaacgaacctttggggcgcgggacagagatcagattgcatctaagagatgaagccaaggagtacttggaagaagacaaattgaaagagttggtgaagaaatattctgaattcattaacttccccatatacctctggtcaaccaaagaagtggatgtggaattgccagctgatgaagaggaatcatccgaagaagaagaatcatctgattccaccgaatcggaagaagaagaaactgaggaggaagaaactgagaaaaaacccaagacaaaaacagtgaaggaaacgacttctgagtgggagcttttgaatgatgt

SEQ ID NO: 3457 - DNA, 161 bp, Lilium asiatic
gaaaggagttgaaggacaagtggaggtaacctttttcatggccgaagttttgtaagatcacagcccttgattttgttagcttggatttagattcttgagactttgtactactactgttactgccacctcttcgccttatctgtaacaattattggcatttc

SEQ ID NO: 3458 - DNA, 411 bp, Lilium asiatic
  modified_base (360)..(360): a, c, g, t, unknown, or other
gttccaatgtgttccgaagcaagggatctcatggatactggtaaagctcgattgtctgagggaatgctaaatgaagcatacacccattttactgaagcattttctgttctccaacaagttacatgtccaatgcaccgagaggttgctaattgttgccggtatcttgctatggttctatatcacgctggtgacatgcaaggagcccatccttcagcagaacaaagagctgatcataaatgagcgctgtcttggtctcgatcacccagatactgctcacaggcaaatgcgcagaagtaaaaatggcagtcagtgtccccagctactacccagacggctatcgatcttctgtaggcatatcangcagcagcagctggaaaaaaccccaacacatcatcagcaaacaaatccatc

SEQ ID NO: 3459 - DNA, 436 bp, Lilium asiatic
cccacgcgtccgcgcaaatggaacaacttcgatactagagtcagaagatgatacatcatcctgagatgcatctttgattggtttctttctttaaataccgcaggtgaaaaaaacttagtctggcctgaagtagagcatcagtttaattagcatttggatataagtgcatatactgattgggagatcattctttacaagcttgaagtggaatagtgtcagctgaggagctgagttactgttttttctgctagatcagaattggaattaatgtaggaggtagggcactatccatttcatttctttgatttctccctttgttggtgccatttctttgtgtcaaactgttgtgcattggatggtcaagaaatgatgattgaggtgctgtgtggtggacttgctaaccagctgaatatagaaaaattggccgcttttgtct

SEQ ID NO: 3460 - DNA, 401 bp, Lilium asiatic
acccacgcgtgcgcagaaagcaaagtggaagcttggctgttcgtgatcttttcaatttagtaaagccagatgatatcatcgcgacagagcatttggtgactcgtcttgcaattgttcctaaatattctcagaaggactggttgtcgagctacgagacattgactacctttgtggttcccagatcatctcgtaagctgcacgaggacaatgaatatgctctttacactgtaacactctttggccgagttgctgataactttaaaatgagtgcacgcgaaaaagggtttcagattcgtgattttgaacacagtgtataaacttgagagggacgtaaacaagagctggaaaagcttatgcatgaccaggataacctgagaagctctcttttgcaatggggttat

SEQ ID NO: 3461 - DNA, 417 bp, Lilium asiatic
catcgcttgatctcttcttgagtctcctcagaaacacaagaagtgatcaacccagtctccatctccaaagatgaccaatgctttggctcctccatctgcagcctcagccgccggccctacgctccccgctccccggccagtcgaaggccaatcggtcttgaagaggctgcagtctgaacttatggctctaatgatgtgtggggatccggggatatcagcgtttccggaggccgacaacatgatggcatggaaggggacgattgaagggagcaaggagactgcttacgagggaatggtgtacaggctctccttcaacttcacatcagactaccccttcaagcctcccaaggtgaagttcgacaccccgtgcttccacccgaatgtcgatctctttgggaatatctgcttggacattct

SEQ ID NO: 3462 - DNA, 428 bp, Lilium asiatic
  modified_base (35)..(35): a, c, g, t, unknown, or other
  modified_base (56)..(56): a, c, g, t, unknown, or other
acccacgcgtacgcatcgcttcatctcttcttaantttttctatatacacaacaanaaccaacccccgtcccgctccaatatataaccaagcctgcccctcctccatctgcagcctcatcctcctaccctacgctccccgctccccggccaatctaacgccaatctgtcttgaagagccttcaatctgaacttatccctctaatgatgtgcgtgcatccggatatatcaacctttccagacgcctacaacattatttcatcgaatgcgactatttaactaagcaagaagactgcttactattcaatcctttacatgctctccttcaacttcacatcacactaccccttcaagcctcccaatgtcaatttccacaccccatacttccaccctaatgtccatctcctttctaatatctcctttcacattc

SEQ ID NO: 3463 - DNA, 402 bp, Lilium asiatic
gttggagtgggtggctatgactgtgagacgcttgtggagcaagagctccctggaggggggattctgatgtatcagagctttgctgcctctcctgtgggggcagaatctccgaggtccaccctgcagcatccatgggacaaggaagatgtgatggaggagaaggccgggaaggataagaaggcaggtattgagagtctggtattttagtctgtctgttttttctgttgtctttatgaagcagcaagacaaactactggtattttactagtagtctatgcttgccttgcttgagtctttacatttctgaagtgtggaataattgtggtgtgcaatgttggccaccattgagtctttatgtttgaactattaagtttctttgaattaaagcatttgtttcgagct

SEQ ID NO: 3464 - DNA, 455 bp, Lilium asiatic
cggacgcgtgggctcatccatcgtcgtccccccacaggaacgagccatgtctgacgaggagcaccagttcgagtccaaggccgatgccggtgcatcgaagacctacccccagcaggcgggaacgatccgaaagaatggttacatcgtcatcaagggccgtccctgcaaggtcgtggaggtgtctacctccaaaaccgggaagcatggtcatgcgaagtgccactttgtggccatcgatatcttcacttcaaagaagctggaggatattgtgccttcctcccataattgtgatgtgcctcacgttaaccgtactgactaccagctaattgacatttccgaagatggatttgtgagtttgctgactgaaagtggcggcacaaaagatgatcttaagctcccaactgatgaggctctgctcacccagcttaaggatggggtcgatgagggaaaagatc

SEQ ID NO: 3465 - DNA, 400 bp, Lilium asiatic
catgtacaaaactgacagagccaagtatgaggctactgcccgttcctggactcaaaagtatgccatggggtgagattactggtgttaacatggacagcagacacatcccgcatcagtcagtaaggccaggattgttatcctgtgtcaacatatattcggatctctgttgctgcctgttatatgtttatgcttcccgtgaatgctttttatgcgtgtcttactatgttgagcttaagtgtctttctatgttgagcctgagaggatgcataccgtctattttctgtaatatactgtggtttactcgaatatgtctccaaatgtttggatgcttgtacagtctaaatttcgctatgttttttttttccagcttatgatctatacaatccttgttggtttaatt

SEQ ID NO: 3466 - DNA, 445 bp, Lilium asiatic
ctcatacaacatgaggaacaccattaaggatgacaagattgcatccaaactccctgctgaggacaaaaagaagattgaggatgccattgaggcggcgattcagtggcttgacaacaaccaacttgcggaggctgatgagttcgatgacaagatgaaggagctcgagagtatctgcaatccgatcattgctaagatgtatcagggttctggtggtgtgcctggtggtatggatgaggatgatgagggtcctgctccaagcggcagcggtgctggtcctaagattgaggaggtcgactaaggtgagagaagttggcatttatcttgtttggttttattaagttaaatgatctggtgaactgcttggatttctggcctgattatatgtttgagggcctgagttttggttgtctttagttggtctttgggatctatttatttgtgaact

SEQ ID NO: 3467 - DNA, 408 bp, Lilium asiatic
  modified_base (28)..(28): a, c, g, t, unknown, or other
  modified_base (57)..(57): a, c, g, t, unknown, or other
  modified_base (108)..(108): a, c, g, t, unknown, or other
  modified_base (110)..(110): a, c, g, t, unknown, or other
accgacgcgtgcgctcagacaacattangaataccatttatgtttataagaccgcanccaaactcccgggctccgttatatttaaaattgaggatgccatttatactncnattcatttgctttacaacaaccaacttgcggatgctgatgagttctattacaagattaatgatctctagagtatctgcaattcgatcattgctaacatgtatcatgtttctgtttgtttgcctcgtcttattgattaatatgatcaatttccttctccaatctataactattcttatcctaaaatttacgatttctacttactttagagaagttgtcatttatcttatttgattttattaaatttaaattatcttcccaactgcttttatttactttcccttaattttttttttaatt

SEQ ID NO: 3468 - DNA, 340 bp, Lilium asiatic
gttcctgagcataatttgcattttcaggtgtattacaagtttagcaacctttcactgcttagagagccaatgatgttaattatggggttcttcctcctgtttactgcctgtattgtctacatgcacaccgatatgtcaatttccaagtcgtccgcctcatatatggcaaagttgcagtgggacgaggtacaagcaacggtccaacaggtccgaaatattattagacgatgtttagcagttcatgataagatggaggcatcattacgagatctctctagaactggagatgtccaatcatgcaaagtggctagaaaaacagctgatgggcaattgaaagaat

SEQ ID NO: 3469 - DNA, 419 bp, Lilium asiatic
gaagcgatacaccaggttatacgcagagaatggataatcgagcattgggagcagagctacgatatcaatgcacttgcaggagccaacaatggcaattctttggttgtgatgtcaaaaggtacagaatatacacagcagtcatacaaagttagtgaaacattccctttcaagtggatcagtataaagtggaaggaaggcttttttgtgacatccatggccacatcaagaagcagatgggcagtggtcgtgtcccggaatgcaggctttacacaacatgttattgagctggacttcttataccccagtgaaagtgtccatcggagatgggatagcggatatcgtataactgcatctgctgcaacagtggatcaagctgcatttgctctgagcattccaaagaagaaaactagtgatgaaac

SEQ ID NO: 3470 - DNA, 430 bp, Lilium asiatic
cttttgagagtgaagaagaagtggcaatggcggaggggaaggggtcggccctcgtccacctgctcgtgatctccctcagcctcaccgccttcggcttctcgatcgccgccgagcgccgccgcagcacaggcacaatagttaccgacaatctgaatgcgacctactgtgtgtatgactccgatgtcgctactggttatggagtaggtgctttcctctttcttttcgctagtgaatcactactcatgggcataacaaagtgcatgtgtttcggccttcctttagcccctggcagtagccgtgcttggaccatcatttattttgcttcttcatggctcaccttcttggttgctgaggctggtattctcgctggtgctacaaagaacgcctaccatacgaaatacagacatgtgatctatgctcaaagctggac

SEQ ID NO: 3471 - DNA, 363 bp, Lilium asiatic
gtgagaaagatgtgtgggttctgtttactgattaggtcttatatcctagccgacttactgggttgtaccgtgctagtcatagtgtctagattgacatgtacttgtcatgcatcttgtgttaacaaggtgcttgatatgtagatgagagtatgtgtcgaatttacaggttggtctgattatgctgatgtcttagatgtttagacctgacgagttcatgtgttacatatacagcttggtcttatcttgttggtgtcttacaagtttggaccttatatttttaagtagtgtggagcttttattgttagtttgctcatgcttagtcggttgaaatttattttgtaccctctgatttggggcaaaagt

SEQ ID NO: 3472 - DNA, 410 bp, Lilium asiatic
  modified_base (9)..(10): a, c, g, t, unknown, or other
  modified_base (21)..(21): a, c, g, t, unknown, or other
  modified_base (68)..(68): a, c, g, t, unknown, or other
  modified_base (90)..(90): a, c, g, t, unknown, or other
  modified_base (99)..(99): a, c, g, t, unknown, or other
  modified_base (118)..(119): a, c, g, t, unknown, or other
  modified_base (150)..(151): a, c, g, t, unknown, or other
  modified_base (168)..(169): a, c, g, t, unknown, or other
  modified_base (181)..(182): a, c, g, t, unknown, or other
  modified_base (205)..(206): a, c, g, t, unknown, or other
  modified_base (228)..(229): a, c, g, t, unknown, or other
  modified_base (249)..(249): a, c, g, t, unknown, or other
  modified_base (271)..(271): a, c, g, t, unknown, or other
  modified_base (289)..(289): a, c, g, t, unknown, or other
  modified_base (305)..(305): a, c, g, t, unknown, or other
ctgtccgannaacttcctagntcataccgcccatctcacttccatataccacattttcacattcacanaatcatggcgcggatcttatcnattgtacanctaaccctttacctcccannatgctgcatttgaaagaaattagaccaggcnnctgttaatccaacattnnctgatgtggcannaagaaaatggttatgccttgganntgcctgtaaaagaactgcatcnnaattaggcgccactagatgnatcatcttcgtccctttcacanaaggagttcatgaaagcnagacccagttgaaaanaattcaagcattctgcatcttgcttctcggtgtagaattaccaagaaatcatcatcatcgagatttgaaagaacaaacgttctcgagaaagaaccatcgatacac

SEQ ID NO: 3473 - DNA, 376 bp, Lilium asiatic
ctccttctgactacgtatcagtaatcgttacagactatggaatggttccgcccaccagcgtgccagtcattgtacgggagtaccgaagggagaatgtatggatgtagtgtttttccttcccaagtgactaccaagatcacatagtctgaaatcacagtatggtcttttgatgctatgtggttcttgatggactatgtttacctgttcgaataattatgtggtatggtagttactggtggtgtatctatgtaactagagtctgtgaagagtgcaacttttgcctctcccaagtaattttgtgggtgtgtttttacttcaaaggtatatgaattttgcgtgcttgttactggaactctgaatgaacgtgaataccttt

SEQ ID NO: 3474 - DNA, 451 bp, Lilium asiatic
  modified_base (411)..(411): a, c, g, t, unknown, or other
cccacgcgtccgtgtgagcaacccttatgctctctggctgctaggcaggctcctgactcaggtgcaggtctggtaccatgggcaaatagcgccacatctactgagttgtttcccaggaagaagccaaatggggacccgtcatctcatcccttgctccatcaacaaccgcatcaaatggttcctgtgcaagatacttacatgcgaagcagagcagaggctcttcataatgttgaatcaaccattcatgagctaagcaacatctttacacaactagctaccatggtatcccagcagggagagtatctggagttttatgtgcttaaagaagatgcatcaccgtgtatctttggccctattgagaaatagaggtggtcgtatgcatgtgctaagcagctaattgaaagactaatntacgctacataatcatatgtagctgaggggggtgaaaatg

SEQ ID NO: 3475 - DNA, 207 bp, Lilium asiatic
gccgccctcgtccgcgaactcgcgccgcccataggagcccaccgccgccgctaccggtaccggcgccgctgtcaactcatctcgtctccaccagccctagtttccctcgttagtccaggtttgctgcctttttttgtagaaaaatactgtacaaggacttgcctctgtgtttctggtttaagttattagaaaatttctgttggggtt

SEQ ID NO: 3476 - DNA, 377 bp, Lilium asiatic
gtggtgctagttattcttcagttgtcaagacaacaatcatgcttgcagacctgaagcattgtaagaaagtgaatgagatatatgcgaaatacttctcatctcctgcccctgcaagatcaacttatcaggtagctgcactacctttggatgcccgcattgagatagagtgcattgcagctctatagaccctaaaccgcaaaacttcggtgaataatatcagctcatatcggctaatgcgactgttctgttcctgtactggtactcgagttctattgcctgagtagtatccttaatatgtatcagaatcagtagcctaaaaacagtgtctgaatgcagtcaaattattaatgcagttctatgttaagaatcagtagcct

SEQ ID NO: 3477 - DNA, 96 bp, Lilium asiatic
aaaaaaaaaaaaaaaaaaaaaaaaaataaaattacaaacaaacaaacaaaacctggggcatcgggaaaaaaaaaaaagagatataggctccatcct

SEQ ID NO: 3478 - DNA, 402 bp, Lilium asiatic
ctagcaggtgccttgtacaaggtcttcagcgcctcacccgatcaggctaggaacgaaatgcgtcaggcctgttttgattatctgagcctcggtggtgtctgctcgactgggcctgtggcgttactgtctggtctcaaccctcgtccgatgagtctggttgcgcatttctttgcggttgccatatatggtgttggcaggctgctgttgccgtttccttcgcccaagcggttctggatcggggctagactgatttcggccgcctcgggaataatatttcccataatcaaagcagaagggatcaggcaagtgttcttccctggtactgtaccggcatattacagaactcctccaacgaaggcttgaatgccaggggtctgttagtgttgatggatctcaattatg

SEQ ID NO: 3479 - DNA, 457 bp, Lilium asiatic
gattatttcttcagaaaacaaacatcatcagggactatttggaagatataaatgagataccaaaatcacgcatgttttggcctcgtgctatatggagtaaatatgttgacaaacttgaggatttgaaatacaaggagaattctacgcaagctgtgcaatgcctgaatgacatggtaactaatgccttgtcgcatgctcaggactgcctcatatacttgtctgatcttaaagatctttccaactttcgattttgtgccatcccccagatcatggctattggaacactagctctatgctataataatgtggagatttttagaggagttgtcaagatgcgacgtggagttgttgctagggtcatggaccaaacaagaacaatgtctgatgtctatggtgctttctttgaattctcatcgctgctcaagtccaagatcgacaataatgatccaaatgctaa

SEQ ID NO: 3480 - DNA, 448 bp, Lilium asiatic
agattgcctgcaaggcctgcattctacaactatatctgcgccatgtcctttttaaatgttctgggactgtttgcctgcttgctagcaggaaatggatcgggattcgggttctggttgttcaacctcaccaccgtatgctatcactctatgtatctaccccttctttatgtgacatttttagcagatttttttcaggaggaggatttacgcttggaaaatgtttactactcggagatgaaagatgctggcttctttgatgctgattgggactagaaatcacccttgggtgtacaatcgctgcactttgatcgtggaagcatttcattatgcttatgactcgccagacccatgtaaataagctcatttccatctgtgttaactggttggtaccagatctgtatctatacattaaccataggaatcagactacatctactacattgaatcc

SEQ ID NO: 3481 - DNA, 109 bp, Lilium asiatic
cggacgcgtggggccatctctatacttaacttgctggtgttgttggttgcatcatttcgggtggttgattacttaaaattagtgccataattttgggtgtgggttctat

SEQ ID NO: 3482 - DNA, 140 bp, Lilium asiatic
gttctagggttctcatctggcatgtatttctttttttctatctcgaaaaaaagaagcttggtcttcttttggtcctgtcttggttaaacatggatgtaggttggttggttggctgtgagtgtgattctgttcttttcata

SEQ ID NO: 3483 - DNA, 279 bp, Lilium asiatic
tggcggtttactcccttgagttgggtgttggtttagttttcgtgagtaacgcatgcatgcattaggttgttgcaggggtcatggatgttagggtttggtctttttcttgtctagggttttaagtttagtttgttgaagaataatagtaattagtgtctaatgtgtgtcttgtatggataatcaagttgttggcgtcgttgggttttaatgtaggggatggttctttgttggcatcaaaattaatgttacctttgtttttgcaaattgattttcttagtt

SEQ ID NO: 3484 - DNA, 454 bp, Lilium asiatic
  modified_base (436)..(436): a, c, g, t, unknown, or other
ccattttgaaattagttttttccgcggcagcaaatgctagtaataacatgggcttgaacaaagcttatttatttattagtaaagctgaagttaacacaggtactattgtgaaaaaattaagaccccgggctcgaggacgtagttatccgataaaaagacctacttgtcatataacaattatattgagggataaaactaaattatttaaagatgaatcttaactttcgattcatctttcgaaaaatatatatggaaagataatctaatagaaaaatatgggacaaaaaataaatccacttggtttcagacttggtacaacccaaagtcatcattccttttggttcgcacaaccacaaaattattccgcgggtatacaggaagatgaaaaaatacggaattgtatcaaggattatgtacaaaaaaataagagaacgtnctcaggtttcgaaggaat

SEQ ID NO: 3485 - DNA, 417 bp, Lilium asiatic
ccatttttaaattacttttttccgttttagttaaagctaataataacaacgcctcgaaccagtcttatttatttattagtaaagcttaaattaacacagtctctatttttaaaaaattaaaaccccaggctcgatgacctaaatatccgataaaaatacctacttttcatataacaaatatattaagtgataaaactaaattatttaaaacataatcttaactttctattcatctctcaaaaaatatatatctaaagataatctaatagaaaaatatacgacaaaaaaaaaattcactttgtttcatacttggtacaacccaaaatcatcattccctttcgatcgcacaaccacaaaattatttcacctatatacaataaatataaaaaatacttaattttataaagcattatttac

SEQ ID NO: 3486 - DNA, 402 bp, Lilium asiatic
  modified_base (223)..(223): a, c, g, t, unknown, or other
  modified_base (292)..(292): a, c, g, t, unknown, or other
agaagacgctctacgagtctaacggtggaggtgctaatgtcgttaaccatgggtataccaagggtgacgggctgggtgctgagattatcggcacctttgtgctggtctacaccgtcttctctgctactgatgccaagaggagtgcgagggattctcatgtcccgattctggctccgttgccgattgggtttgcggtttttctggtgcatttggcgaccatccncatcactgggactggtatcaatcctgctaggagtctaggggcggctatcatctacaacaagaagcatgnctgggatgatcattggatcttctgggttgggcctttcactggagctgcacttgctgcgttgtatcacgtggtggtcatcagagcaatcccattcaagagcagagcctgag

SEQ ID NO: 3487 - DNA, 417 bp, Lilium asiatic
gaagaacagtaaggcaccaaagattcagaggctggtgactcccctgacactgcagaggaagcgctcgagaattgctgagaagaagaggcgatctgtcaaggctaaagctgaagctgtggagtaccacaagctccttgctaccaggctcaaggagcagagggaccgcaagagcgagagtttggctaaaaagcgatccaggctttctgctgccactaagccaactagtgctgcctaaatcatgattttatttagtaaaagagctgccactctaatcttgatctcatttatgcttttgtgaaattttgttggtgaagtctgctttgctagtttgttgagtctgatttaatgaatcttgtttgtgaattttgaacttgtgctactgctgtttatctatataatgggttttgcttaactgtc

SEQ ID NO: 3488 - DNA, 243 bp, Lilium asiatic
cccacgcgtccggcgaaacaatagaattggcacttgttgtatgaggataatttatggctaaagcttgttttgatatactaggaaaaataagatcagcaggttgtaccatttggattgaaaaaggaggacgagttcaataaagccaacctcaattaggagagtgatttatccggattccggattgtattattttggacattgaatatttttttttaatatatattaatattaccattttctttc

SEQ ID NO: 3489 - DNA, 411 bp, Lilium asiatic
  modified_base (326)..(326): a, c, g, t, unknown, or other
  modified_base (357)..(357): a, c, g, t, unknown, or other
  modified_base (375)..(375): a, c, g, t, unknown, or other
acgaagttgaagacctgagaatccttcctgttcattattccgataactacttctcacttgtgcctggtgagacgatgaacatttcgatctcgttcgacgtgcctcaaggtgtgactcctcgtgtcgctcttcgtggatggaatttggaggagcattattccgtcctctgaggtgcaagcatctctctgatcaagctctatgcatggtggtgaaagaatggctcctgtggcgacatttggtgttggaggtgtatgagctcattgaggtctagtctgccttaaataaaaaaagagctacttcgtttgtgtaataaagaagctgagatncgttgatgttgggtctcggcattctacttcntgtttcgtgtgaagaatngattccaataataagccacgttgtaatttgtactgg

SEQ ID NO: 3490 - DNA, 188 bp, Lilium asiatic
tttctacattacaataaatttaggtatacttctgtagtttatgatcttattcaatcataatggaatttggataatattagaacatattagggaatatatctcaaaacaagatctaaaatttgttattagatccaatctatgattatattcttgagtattatgattaattaataaaaaaattgggcttc

SEQ ID NO: 3491 - DNA, 399 bp, Lilium asiatic
  modified_base (259)..(259): a, c, g, t, unknown, or other
gtggcatccgaatgtttatccggatgggcgtgtttgcatatcaattctgcatccaccaggggaggacccgaatggttatgagcttgctagtgagcgttggactccggtgcatacggttgagagcatagttttgagtatcatttctatgctttcaagtcccaatgatgaatctcctgcaaacattgaagctgctaaagactggagagagaggagagatgaattcaagaagaaagtgagccgtgttgtgcggagatcgcangagatgttgtgaatgctcgcagtgacatggcgcgccctgtaagtgcatcgcctgagtctctggaatggatcagggtctctctctgggtttctgcatgtttaatcatacaatctgagcatgtgtagatttttttttttaaa

SEQ ID NO: 3492 - DNA, 521 bp, Lilium asiatic
  modified_base (69)..(69): a, c, g, t, unknown, or other
  modified_base (83)..(84): a, c, g, t, unknown, or other
  modified_base (93)..(93): a, c, g, t, unknown, or other
  modified_base (112)..(113): a, c, g, t, unknown, or other
  modified_base (121)..(122): a, c, g, t, unknown, or other
  modified_base (135)..(137): a, c, g, t, unknown, or other
  modified_base (145)..(146): a, c, g, t, unknown, or other
  modified_base (160)..(161): a, c, g, t, unknown, or other
  modified_base (176)..(177): a, c, g, t, unknown, or other
  modified_base (192)..(193): a, c, g, t, unknown, or other
  modified_base (218)..(218): a, c, g, t, unknown, or other
  modified_base (260)..(261): a, c, g, t, unknown, or other
  modified_base (318)..(319): a, c, g, t, unknown, or other
  modified_base (360)..(360): a, c, g, t, unknown, or other
  modified_base (378)..(379): a, c, g, t, unknown, or other
  modified_base (395)..(395): a, c, g, t, unknown, or other
  modified_base (397)..(398): a, c, g, t, unknown, or other
  modified_base (408)..(409): a, c, g, t, unknown, or other
  modified_base (418)..(419): a, c, g, t, unknown, or other
  modified_base (457)..(458): a, c, g, t, unknown, or other
ttcccgcggtccgacccacgcctgtccgcctcaccgctgttctcgcggagaattaccaccttcttcatnattcgccgaccganntttcacctnaacacacgatcctggtggnnatggcagnntgtagccatcaannnagcaaggnnaattcgactttgtnncttcaccgatgcganntctagcggtcatatnnttcgtctttcgcggtacctggatcnagcagcgttcaaccagtaagcgatttacacttgaacacgtanntgagcctgactcgtttccaagcccatgatatcgatgccacaagaagcgctttaaaannccactgatagatttaaagcattgtcccgtcttcgaaagttngaaagggagttcaaccgnngcagggagaaagccananncagtcatcanncatgaagcnnagatatgacattcaagggcccccatatttataccattnnatagtatttaaatatgggccataggccaagttcaatttaattttcctttttctcaaaataaaa

SEQ ID NO: 3493 - DNA, 353 bp, Lilium asiatic
cccacgcgtccgtgcaagccctctttactccatacaagtcaatcagttgcagcagggactgggtttgttagtgataagaattttgcctgagaatgcattctgaaattcccctatactatatactagtacatttttcttttcttcttttcattttcattcttttgtttaatatcttcaaaagctgtatcagaatctttcatttagcgggctttatattttttgagatactggatattttgtccgatgagaatttctcaacaagataggatggtgtgcccagaaggcttgtgttattgtatactcttaactggtacgacatgcttatttcaaatcgtgatcctaaagctgtaaat

SEQ ID NO: 3494 - DNA, 326 bp, Lilium asiatic
aaaaaaaaaaaaaaaaaaaaaaaaattaaaattaaaaaaaaaaaaaaaaaaaaaaaaggaaagggaaaaataaaaaaggtcggccgttcaaaaaatatttctatatcaaaaacaatctatttaaaaaaatgggtcgtccctttcccattctttttaattcgtaactgttcttttttgagatttaaattttatttacccggccttcctacacaatagtttttttttggagaaccctaattttatttaactgccccgccttttacaacatcctcatttgaaaaactttcgcattacccaatttaatcgctttgaacaactttcccttt

SEQ ID NO: 3495 - DNA, 240 bp, Lilium asiatic
  modified_base (204)..(204): a, c, g, t, unknown, or other
cggacgcgtgggcgccctttttttttttttttttttttttttttttttttgaaaccgaaagcgtttgacaaacaaaccaaacccacatttttacactcatccatatcctggggatactaaggcaccatgatcggctgccttttcaagtggcaccgctgtaatggggcagctaacccggcacgttgggcacgacggccaggcggngagccaccggtcgacgcactgggcatggaacccatg

SEQ ID NO: 3496 - DNA, 301 bp, Lilium asiatic
  modified_base (36)..(36): a, c, g, t, unknown, or other
ctaaaatactcattttagttactatccctacaaacnacctcaggggatgcgtttattttcaaaaatgcacacccttattcaatttacaatcacaatttctaaaccgattgaacacgtaaagatccatctctaccattatttaacttttgtatgttacattcctcactgaaagactacgtacttctgtattgaatataaccctattctatttctaacaggaatataaccctattttatgatagtcagcttactgatgtgatcccaacaacacttaactaatcttatttataaatattttatc

SEQ ID NO: 3497 - DNA, 372 bp, Lilium asiatic
ggttattttgatgacaattgaagcacttcaaagcctgtcattttcttaatgacaagatttcggttggaaaaaaaaaaaaaaaaaaaaaaaaaaaaaaaaaaaaaaaaaaaaaaaaaaaaaaaaaaaaaaaaaaaaaaaaaaaaaaaaaaaaaaaaaaaaaaaaaaaacaaaaaaaaaaaaaaaaaaaaaaaaaaaaaaaaaaaaaaagaaaataaccaaaaaaaaaaaaaaaaaaaaaaaaacaattccctaagggggccccttttaaaaaaaaaaaaattccaaacccctaacccccaaaaaaaaatttttttaatgggacccaaaaaaaaaaaaaatgggcccccctaaaaaaaaaaggaaccggaaaaa

SEQ ID NO: 3498 - DNA, 438 bp, Lilium asiatic
ggcgaagccaacgaagaatgtctgcatttatgggagctgctggagtgctccatttgtgatccacatgttggtgttcagcctggactgcctgtaatatgcacctccctttgcaacaaggttctacaagcttgcgcaaatgcatattttgctattgatgctatgacccaggttctgtctccttgtgggttgggcgacactgtttgtggtagagcagctgaatgggtctccaatggcacggagttctgccaacttgcaggtttttctgtgcaaaaagctggggttagcaatcgtgatgctgatgagcaattttgctatggtgggaaggtgagcctagaatctgttgctgattcgtggaggagctcacaatctggctcacctgttaaaggcgatacgtttagtgtgcttgacgattttcagcaatgggcaagagaaatgcca

SEQ ID NO: 3499 - DNA, 427 bp, Lilium asiatic
cttttctgcgccagctcaatgttttggaactattcctagactgcttaacggagccaaatgaaaaacttattgagtttggggctggtgggatatgcaactcttgtgtagacccttcaaatgctgcaattataattcagtgtggtgggattcctttgatcatagaatgcttgtctagtccagttagaaacacagtgagttatgctcttggagctttgtactatctctgcaattcttcttctaagaaagaaatcttgaaaccagaagtagttgaagtcatacggaaatacgctgctgctgaagctgttaatgcgagttttagcaatttggccaatgcttttctggacaagcatgtgcttcagcgaacttaacgcagtctggataagaagaatggtaatgtgggaagacagatgaaaaattaagaatgttc

SEQ ID NO: 3500 - DNA, 270 bp, Lilium asiatic
tgtacacctcgagcctacattgtaaacgatccatgtatacgatcccatgtatgctacgcgagcgtgcgactatatagctaccttatagcaatacattgatcgactttactcaacgtcgtgactcaacaaaccgactcgtaacacaactgaattacctagcataatatccttgtatcacatgctggtgtcatcagctagaggcatagacaaaacgcccttaccaatacgtcttcacaacaaatggccaatgtgactcgcgattgagacgcg

SEQ ID NO: 3501 - DNA, 420 bp, Lilium asiatic
cttcaacctctcatcaatcatgtctgggcgaggaaagggagggaagggtctcggcgaaggcggcgccaagcgccaccgcaaggtgctgcgggacaacatccagggcatcaccaagccggccatccgccgcctggctcgccggggcggagtgaagaggatcaacgaccttatctacgaggagaccagaggcatgctgaagatctttctggagaacgtcatccgcgattccgtgacctacactgagcacgcgcggcgcaagacggtgacggcgatggatgtggtgtatgctctcaagcgccagggccgcaccctctatggcttcgggggttgatctagtactgttctcttctgggtttggtggtctatatctgatttgggttggttcatatttctgatatgaaatgaaatctcgtcttgaat

SEQ ID NO: 3502 - DNA, 374 bp, Lilium asiatic
gccgccgccgcctgacggaagaaagagagagaaggcgaagatggtgcagcgcttgacctaccgcaagcggcacagctatgccaccaaatcgaaccagacaagggtcctcaagaccccaggaggaaagctggtataccagaacacgaagaagcgtgcgagcgggcctaagtgccctgtcactggcaagaggattcaagggattccccacctaaggcctactgagtacaaacgctctaggttggccagaaatcagaggactgttaaccgtgcttatggtggagttttgtcaggaagtgctgttagggagaggataattagagctttcttgcttgaggagcaaaagattgtcaagaaagtactaaagatccagaaga

SEQ ID NO: 3503 - DNA, 311 bp, Lilium asiatic
acgaattccctcatttcgaactcagagagagagagctgaagagatggaatctggaaagatagccaagggtgctgccggccgcaagggcggcgcaaggaagaagtcggtcccgagatccatcaaggctggcctccagtttccggtaggccgcattggccgctacctcaagaagggtcgctatgcaaagcgtgtaggctctggagctcctgtctaccttgccgccgtgctcgagtaccttgctgctgaggtgctggagctggctggcaatgctgccaaggacaacaagaagtctcggatcatcccgagacatg

SEQ ID NO: 3504 - DNA, 310 bp, Lilium asiatic
  modified_base (309)..(309): a, c, g, t, unknown, or other
ctcgcggggtgctcaagatcttcttggagaacgtcatccgtgacgccgtcacctacaccgagcacgcccgccgaagaacggcaccggcattgaccttgtctacccttttaagcgccaaggacgcaccctttatggcttcggcggctaatctaactagggtttctgcggatgaactagaaattaaatcggtctcctctttatcttaagtgtgtttagtatgtgatgtgaatcttgttttgttgaacatggagctgtattagatgtttgtgagaatgtgagctgttatgctatttcctactgcttccattnt

SEQ ID NO: 3505 - DNA, 409 bp, Lilium asiatic
aaaccagcctcttgttatgatatcaaaacctgttcccaagaaggatacttttcaggtcaagtcggggatatgggctgactctttaagtcgtggccttattgatctgaacataactgctcccaaaaaggtctctctagcagatatcggaatagtgggaggtcttgatgatggctttagcgaaaaagagaaagggctgcctccgtcctcttacatggggagagccatgggtgcaggatcaaacctaggttggtcaggatttacatcggcgggaggaaatagtaacttctcaactcctggccagcagcaattcggaagcttcaagtgataattttatcaatctattcggcatttttttttactatatactaggttctaagccaacataatttctacctgctatactcgcaat

SEQ ID NO: 3506 - DNA, 231 bp, Lilium asiatic
ggtgcagcgctttacctaccggcaggcgtcatatttatgccggcgagctaaccaaacaagggtcctcattaccccaccaggaaagctggtataccataccacgaaaaagcttgcgagcgggcctaatatccctgtcactgtcatgaggattcaagggattctccacctaacgcctactgagtacaaacactctactgttgaccagaaatcacaggactgttaaccatgctt

SEQ ID NO: 3507 - DNA, 443 bp, Lilium asiatic
cccacgcgtccgctcttatggctcgatctccgacctgtccggcgtcaaggctaagacgctcttcgtctgggtgccgattaccggcatcgtcgcacaaccggccgactccaccatcgttttcgaggttgggtttctgtcggagtctcatcctgtatcagagttcactgagattccagtctgcaaggccaacgttgggtgccgcgggtctgctgggatcatcagcgagaagctgcccatctctgaggtttgagctggataaatctcgcaagccaacatgcgaacccgtgagagcatcagtgaccaggtttattgaggataatatgtttcatattacgttcaaataatgttttatctagagacctcgtgcataattaaatggcaatgtcatctggttgtaagctttatctgtttttttataatactggatttctctatttatgaaa

SEQ ID NO: 3508 - DNA, 413 bp, Lilium asiatic
ccattttctaaaagagagagaggagcggcgttgtaaatggcggcggatcccgactcggtggctcaggccttcgtgaaccactactaccagaccttcgacaacaaccggccggcgctcggcaacctctaccaggactcgtcgatgctctccttcgagggcgccaagacccagggcgcccaagccatcgtcgccaagctcaccggcctccccttccagcagtgcgcccaccagatctccaccatcgactgccagctctccggccccgccggcggcatgatcgtcttcgtctccggctccctccaactcgccggcgaacagcacactctcaagttcagtcagatgttccatctgatgccgacgccccagggaagcttctatgtacagaatgacatattccgcttgaactatgcatg

SEQ ID NO: 3509 - DNA, 432 bp, Lilium asiatic
gtcctgacaaaggagagagagttgaggatgaaatgtgttgagttctcatcacccacacgggagatatttataatgataattggtgatgacatacgaaggttgaactatgtacacaacactaaacacccaagctactttacacctacagtcggctatgtacatcaacacctcccgtgaaacccaggcatgatcaaacattatgagtttcccccctaggaattggaatcagtgaatatggtgaaacttgatgaagaagttggaatcttagttgtagtggagacttgggtagctagtcaatcttgagaagaattgaccgacgaacatagtgagcatcaacctcaatgtgcttaggtcacaattggaacacacagttgctagcgatttggacgatgcttttgtagtcgcagaagagtggagtcagtgtctgaaaca

SEQ ID NO: 3510 - DNA, 371 bp, Lilium asiatic
  modified_base (331)..(332): a, c, g, t, unknown, or other
  modified_base (336)..(336): a, c, g, t, unknown, or other
gtctccgtcgacactcttattgaagagcgtctcaccgttgagccttttaatgagtacattcagagttgtgatatcgctgcattcaacaagatctaaagcttgtttgctgccgtttaggaccagtttcttttacttattttctgaggataatgtttaatctttcaacttattgagtgttttgaggtataatatctgttctatcaagttatgtagaactttatgaaaaaaaaaaaaaaaaaaaaaaaaaaaaaaaaaaaaaaaaaaaaaaaaaaaaaaaaaaaaaaaaaaaaaaaaaaaaaaaaaaaaaaaaaaaaaaaaaaaaaaaaaaaannccanacaaaaaaaaaaaaaaaaaaaaaaaaagggggggc

SEQ ID NO: 3511 - DNA, 399 bp, Lilium asiatic
ctaaagcttcaacctctcgtcaatcatgtcaggccgtggcaagggagggaaggggctcggcaagggcggcgccaagcgccatcgcaaggtgctgcgggacaacatccagggaatcaccaagccggccatccgccgcctggctcgccggggcggagtgaagaggatcagcggcctcatctacgaggagacccgaggtgtgctgaagatctttctggagaatgtcatacgcgatgccgttacctacactgagcacgctcgccgcaagactgtgacggctatggatgtggtgtatgctctcaagcgtcaaggccgcaccctctatggctttgggggttgatctttgtctcctggcctgggtctctggttggttttggttgggatggaatttgggttttcaag

SEQ ID NO: 3512 - DNA, 404 bp, Lilium asiatic
ggccgacgacgcgtccgccacgcgtccgtgttgatcagttggatagtttatttccagagtttcggagtatatagctagttggatagcttactcaaatgttgtgtaaatcagaccaattcaaattaaagctaaggagaaagaatggctatagaagaatacacaaagaaggcatatcttggtgagagtgatgacgatgatgcacctttagtttttaaaagaaataaaactgctttcaagcatggccagtcgagttcagctccaaacagagtaccttctcaaaaccctgacgagtctttggggaggattggttctcccaaaggcgagatctcaaactcagaaaaagcgaagttgccttcaactgcgaagttatcagctgaaaaatcttccacaatgagcaaagtttt

SEQ ID NO: 3513 - DNA, 286 bp, Lilium asiatic
gtgggttaatggttacgcagcatcagccaagactcaaaaacacgagcatgcatgtatcgaaaaccagcacgccttcattccctttgcgttcgatacatttggctttttggcaccagatgctgtggatctccttaagagagttcagagagtcatgaacaacaatgttatgactccgggtaatattgaatatgtattcaggagaattgggtttgcagttcaaaaaggtctagcggcgcagcttgttacccgcttgccttcaatttagtgcattgtattgtctttcttg

SEQ ID NO: 3514 - DNA, 414 bp, Lilium asiatic
cccacgcgtccgcggacgcgtgggcaagttgaagttccaattccttcaccgaaaaaaggtgaagttctgttaaaagtggaggcagcagctataaatccagttgattggaaaatccagaagggtttgctaagaccattcttacccccaaaatttccatttgtaccagttacagatatcgcaggagaagttattgaggttggctctgcagtgcagaagtacaaacctggggataaagttgtgtcaatactcaactcttttggaggtggactagctgagtatgccatagctccggtaaacttgacagtaaataggcctccagaggtatccgcagcagaaggtgctggcctaccgattgctgccctcaccgctcttcaggcattgaagtctggaggagccaagttcgacaccactggt

SEQ ID NO: 3515 - DNA, 380 bp, Lilium asiatic
tgcaaacccaattcctcgcatcttcctcaattcgagagatatggtgaccagtggcaagtcaaagaagggcaccggcggccggatcggcggcggtccgaggaagaaggccgtctctcgctcagtgaaagccggcctccagttccccgtcggccgtatcggacgtttcctcaagaagggccgctacgcccagcgcatcggcaccggtgcccccgtctacctcgccgccgttctcgagtacctcgccgcggaggtgttggagctggcgggcaacgctgcgaaggacaacaagaagaaccggatcattccgaggcacctgctgctggctgtgagaaacgatgccgagttggggaaacttgtgagcggcatcaccatcgctcatg

SEQ ID NO: 3516 - DNA, 433 bp, Lilium asiatic
ggcggagcgaagcggcatcgcaaggtcctccgggacaacatccagggcatcaccaagccggccatccgccgcctcgcccgccgcggcggtgtgaagcgcatcagcggcctcatctatgaggagacccgcggggtgctgaagatcttcttggagaacgtcatccgtgacgccgtcacctacaccgagcacgcccgccggaagacggtcacggccatggacgtcgtctacgcactgaagcgccagggacgcaccctctatggcttcggcggctaatctatctatctatcttaaggttccgcggatgaagctagaaatcaaatcggtctcctcttatcttaagagtgttaagtttgtgatgtgaatcttccgttttttggtttcttctaaacatggagctgtattagatctttgtgagtttatgagcctgtttgct

SEQ ID NO: 3517 - DNA, 373 bp, Lilium asiatic
caaaccctcgccgccgatctctgatctccgatggcccgtaccaagcaaaccgctcgcaagtccaccggtggcaaggcccctcgcaagcagctcgccacaaaggctgcgaggaagtcggcgccaaccactggcggcgtgaagaagccgcaccgctaccgtcccggcaccgtcgccctccgtgagatccgtaagtaccagaagagtacggagctgctgatccgaaagctgccgttccagcgtctggtgagggagatcgcgcaggacttcaagacggatctccgtttccagagccatgccgtgctggcgctgcaggaggcggcggaggcgtaccttgtggggctgttcgaagacaccaatctctgcgcaatccatg

SEQ ID NO: 3518 - DNA, 447 bp, Lilium asiatic
  modified_base (393)..(394): a, c, g, t, unknown, or other
aaatctctcatcaatcatgtcaggccgcggcaagggagggaaggggctcggcaagggcggcgccaagcgccatcgcaaggtgctgcgggacaacatccagggcatcaccaagccggcaatccgccgcctggctcgccggggcggagtgaagaggatcagcggcctcatctacgaggagacccgaggcgtgctgaagatctttctggagaacgtcatccgcgatgccgtgacctacaccgagcacgcgcggcgcaagacggtgacggcgatggatgttgtgtatgctctcaaacgccagggccgcaccctctatggctttggggggtgatctgtatcctgttattcggatctctggttggttggtttggggggaggtttggttggggaccaatnngattcatgtatctcatatgaaatgcaaataacttctttttgctggtttaattc

SEQ ID NO: 3519 - DNA, 310 bp, Lilium asiatic
gaattcactgatcctgactacaatacaaggcgcagtgcaacatatttgccagaggtggctgcccaggaagggtggactaagctggaggccattgactcgctgatgaggaaggcaggctacaatggtgccatcacagagtccctccgcaagcggctccacattacccgctaccagagcagcctctacacaatgcactacactgaatacgtcgcctatatcaaggcgacaagagaggcagcccctgttattgttggggccaagccttaaccattgatttaccatcttgctacattggtatgttgtgaaaaac

SEQ ID NO: 3520 - DNA, 366 bp, Lilium asiatic
  modified_base (365)..(365): a, c, g, t, unknown, or other
atcaccattggttgtgcatgcatggtgctcggagaagaagggatgccaggcagaagacgagatctataaagccctaaggacgagcgatgaagttccccaagtctcagacgaagaagttcaccatttctctgagcctccttcatccaggaactctgcttagtgacagagtcgagttcggggaagaaggagtaggtagtagtcgtattctgttagatgatatgtatttttttttatctgtttgagttgtagtaagttagattttcattctctttcgtgttttagctttcgattttgtctgtaataatgattctcgttctagttcttctgtactcaaacttttatttctaatacaagtgttgttattnt

SEQ ID NO: 3521 - DNA, 261 bp, Lilium asiatic
  modified_base (258)..(260): a, c, g, t, unknown, or other
aaaaaacaaatatatatatttaggtgtgaggggaattggagagatttatcatgcctgtagatggtattgagttgtcttaattgagccagttcctatggactgaaatttcataatttctcctttattattagatatacatcacatttattattattgttcatctttatattatgtaagaatcaattttcccattaaagaaaaagttggctaacagatggtgcctaaaataagatattggcaataattagttattgctcnnna

SEQ ID NO: 3522 - DNA, 290 bp, Lilium asiatic
  modified_base (15)..(15): a, c, g, t, unknown, or other
cggacgcgtgggctnaaaaaaaaaaaaaatttatttaaaaaaaaaaaaaaaaaaaaaaatagtggtggaattaaaagaggaaggagtgggggttccttttatacggacgccggccgccttggataatccaggcttacgggcccttcaatacaaaattttacttcttctatattgcaacctaaaatcattttaatgccctgccttaaacaacattaatagtgtgaaaacctatgacgttactcaacttaaaacccttgcaccaaaacgccttttccccagttggtttaaaa

SEQ ID NO: 3523 - DNA, 373 bp, Lilium asiatic
agagactggcatttcccccgtcgtcgccgccgttcgatggctcctctcgctcccaagaccggggatgccgccttcgccgccatggagcgcgtgaatgcggagctgttcacactgacgtacggagcgatcgtgcggcagctcctgacggatctggaggaggttgacgtggtcaacaggcagctcgatcagatgggttataacattggaattcgattgattgatgaatttcttgcaaaatccaatatatcacgatgtgttgacttcaaggatacagctgaagtgattgctaaggttggtttcaaaatgttcctaggcgtaaatgcatctgtgaccaattgggatgcggaggggacaagttgcagcctggtattag

SEQ ID NO: 3524 - DNA, 398 bp, Lilium asiatic
cagattctccacttggaagcatggactctcatccgaagctagctcaagtgatcaaggtgataggtcgaactgggtcgagggggcaggtgactcaagtgagggtcaagttcctaggtgactcagaccgcatgatcatgaggaatgtgaagggacctgtccgcgaaggtgacattctcacgttgctcgagtctgagcgtgaagcgagaagacttcgctagttatattttcttgttccttcccaactccaatcgttgtggtttcttctctttatccctgcatgatagaacaaatgctattactcgacttctattgtcttttatttcagatgttgggtgtgtttgattgagctcttttgccatgacaaatggttgtttgccatatattatctatgttctaca

SEQ ID NO: 3525 - DNA, 399 bp, Lilium asiatic
cctaatagcaaccgtgggtggcggatccatagttcaccttctaatacttgttctgttagtagattgaccagtaatctacccgatatgtgcattctgggctctgagtcaaagacaggggcattgtctacccaaggaaatgagagatatcatggttttgttggtaaggatacatgcattcccagtcggtttgctgtggatgatattgagtctcccaatggagaccgggtgcagccggggttccatttggattttacagacagcgcaaagtttgtcagcaatgttttaccatattattctgcaaatgatgccatgggtgtcctatccaaggacgggttagctggatgtttcctgaaatcctagagtgtgcttcgtggacttcatcaaccgcattgaagacat

SEQ ID NO: 3526 - DNA, 133 bp, Lilium asiatic
gtagtttgttgttttgtgtttctgatttgttgctcagactcgaatgcatattttggtgagccttttggatggtttattttgctacttattatcatctatcttctgtcatattaactttattgtcttggtgatt

SEQ ID NO: 3527 - DNA, 352 bp, Lilium asiatic
atggcttcactaggcttcggggctgcgacttcggcagcggcagcaaccgcagcatccaggggaagaaggtttacggcggcagcgactaatagcaccgctgggagcaccgaggagaagagcttgctggacttcatcctgggaggcttgcagaagcaggatcagctcctggagactgatcccatcctccaaaaggtggagaagagcggcaccggcaacggcaccggcaccggatcgaccgggtccaaaaagtcgaccacctctgtctccatccctgctaagaagaaagccggctgtggcggtggggtgttcggcggtttatttgacaagaaatgaaacacagtttgagcattgt

SEQ ID NO: 3528 - DNA, 355 bp, Lilium asiatic
gaattgacacgtgataaatgggttagtacgtggttagggttagaggttttcgtgagaacgtgtgtaactgcagcagctgatcgtgagaggacgtgagatcgtgttgctgatagttctcagttgtaaagcttataaaccaattttgttaattaatgaaatgaaggaggagaggctgcagagttctattgaaattagcagagtaatcttctcttccttccctcgcgaagctttcactcccttctctagctcgctgctgatttgccccatctctccgaagtgccactcggacagcagaacgccagtgctgggttgatctgccccatctctggggttgatcagtgaaaatgacagggat

SEQ ID NO: 3529 - DNA, 338 bp, Lilium asiatic
ctcttcacctggtcttgaggcttagaggcgtgacaatgatcaaagtgaaaacgctcaccggaaaggaaattgaaattgacattgaacccactgataccattgataggatcaaggagcgggttgaggagaaagaagggattccacccgtgcagcaaaggctcatctatgctggcaagcaacttggagatgacaagactgccaaggaatacagcattgaaggtggttctgttctccatctggtacttgctttgaggggcggttattaggaaaattatattttagagaggagacatgaaaggagaggttaaatatgttcaaatatatatagtcttacccct

SEQ ID NO: 3530 - DNA, 265 bp, Lilium asiatic
tcggggaggttgggcagaccgaatataaggaatgctgcatgagacgatcatcctggaaacacgacgctgcgggaggcttttggtagcaatctaccaaggatggcctagaacccccaagggctgcgtcgaggtagacaaaggacattgttgctctaaccatgcctgtttggacgaatttctgacggcggtcgaaggccatgttttggccctgtctcttttttctagtgagatggtataaagctactattggctcgtggcctagtct

SEQ ID NO: 3531 - DNA, 371 bp, Lilium asiatic
gggcacggaggaccggccatgggaatgatgttaggtgggggtgcagcagctgcagcacttgcgtgtggcgcacatcaaatgacttctcatcatggtggtggtggacatggcggtggtggacatggcggcggttttctcggacacggagggtcacatgaaatgtcacatggtggaggttatggaggttatcctgggcacggagggttctcaggacacggaggttatgctgaacatggtggtcacggtcatggcggtcatggccatggcaagttcaagcatgggaagttcaagcatggaaagcacggccaccatggcaagttcaagcatggaaagcacggccaccattgaacatgttaccatcgcacttgaac

SEQ ID NO: 3532 - DNA, 264 bp, Lilium asiatic
  modified_base (9)..(10): a, c, g, t, unknown, or other
  modified_base (20)..(21): a, c, g, t, unknown, or other
  modified_base (30)..(31): a, c, g, t, unknown, or other
  modified_base (54)..(55): a, c, g, t, unknown, or other
  modified_base (73)..(73): a, c, g, t, unknown, or other
  modified_base (126)..(126): a, c, g, t, unknown, or other
  modified_base (128)..(128): a, c, g, t, unknown, or other
  modified_base (145)..(146): a, c, g, t, unknown, or other
  modified_base (169)..(169): a, c, g, t, unknown, or other
  modified_base (198)..(200): a, c, g, t, unknown, or other
  modified_base (209)..(209): a, c, g, t, unknown, or other
  modified_base (217)..(217): a, c, g, t, unknown, or other
  modified_base (219)..(220): a, c, g, t, unknown, or other
  modified_base (228)..(228): a, c, g, t, unknown, or other
  modified_base (243)..(243): a, c, g, t, unknown, or other
  modified_base (245)..(247): a, c, g, t, unknown, or other
  modified_base (256)..(258): a, c, g, t, unknown, or other
ccgtccgannattgattganncttgaaaanntatcaagttattattgtattgannttgactctgtctcagtanttggggcgctagcgatgtatgtgttggagggtaccctcttaggggtgatggcntntcagttgcggtgctcannaaataacctttatttagacatanctcctcatttctcattcctaagagccctnnntctttattngtgtggcncnnttagggcngccaattaaaacctntnnntatcggctnnngaatcc

SEQ ID NO: 3533 - DNA, 308 bp, Lilium asiatic
gcgtcttgtccgggagattgctcaggacttcaaggccgatctccgcttccagagctcggcggtgtcggcgctgcaggaggcgtcggaggcctacctggtggggctgtttgaggacactaacctctgcgccattcacgcaaagagggtgactatcatgccgaaggatatccagctcgccaggaggatccgcggcgagagggcttgatgttgtgaatggttcgctactcgcgaaaatgttggaaaatggtttctgttgtctttgttctactttggtggattaactagctatcaaacttctgggattgttc

SEQ ID NO: 3534 - DNA, 191 bp, Lilium asiatic
accacacgtgcgaaactagatgcagatcttgatgcagatgcaaccactggcggcagacggtgctgtacatggccaggttaccaacgatgttatgcatcagaacatgcatgagaacaagcccatgcttgtggaccttcttgacaaccaggcttctgagtgagctgaagaatgagctgagcatcaagccaagc

SEQ ID NO: 3535 - DNA, 313 bp, Lilium asiatic
actggaggtacagcgagtccgcacggcacccggcggccatgccgccgccggccgccgcccgtctgaagcgcccgcggcccgattatcccgatatgcctgttggtccggaaatgcatggctactatggagatgatggaagaggatctggacaacatgcaattagggacactgattctatcaatgcgtcttatgaccgatttctgcgcaatggcaacccttacggccctggagaaaatgttagaccattgggtggcatgccaggtcgccctgtagaagatttgcgcatgttgggtgccggtgatggccggaatgt

SEQ ID NO: 3536 - DNA, 374 bp, Lilium asiatic
gggcgacgccggcgaggctcctctctacttccttcagaaaatgacgacttcaaggcgcctggcagacaggaaaacagcaaaattccagaagaacattacaaagagggggtctgttcctgagacaacagctaagaaaggaaatgactatcctgttgggccaatcctgcttggtttcttcgtctttgtggtcattgggtcatctctgtttcagatcatcaggacagccacaagcggggggatggcctgaatacaaatgatagtgagactttcaaggctctggcagtacgaatttacgttacaatgttaacctgaatattagagatattatgttaagaaacttggttgtgtcggtgtactctttttaccttattgac

SEQ ID NO: 3537 - DNA, 264 bp, Lilium asiatic
taggcaaaatcttgcaaaactgtttatgcaggccacttaaggtatcaccgaatggctgaaatcttttcgggttattgttaccatttaggttgacattgtattttggctacttgtttgccttgtagagatgtatttcctttgaatcctcccttattatggctgttttctagatatttttgaaagataactaatatatattatctatgactgcttcgaatttccaaaaaaaaaaaaaaaaaaaaaaaaaaaaaaaaaaaaaataat

SEQ ID NO: 3538 - DNA, 387 bp, Lilium asiatic
  modified_base (374)..(374): a, c, g, t, unknown, or other
cggacgcgtgggcggacgcgtggggtgaacggatgtctccttgacgtcctggtaaaattttagctcgaaccaacggaggaatgcaaatctgtaatgattctttcgagggatattcaggctggactgcacgatccgagccttgctacgaagtcctcctgaaccttcctgagtgccttggacttctctttcgcagaggtgtggatgccaagattggtcgaggtagtttttggtgtcaacatcctctgtgtggtttctttaatgacttgctcaccaaggtgtggacgccaagattggtcgagatagtttttggtgtcaacaccctctgtgtgatttctttaatgacttgctcaccaacttatatcctctattatagntctacatgattgt

SEQ ID NO: 3539 - DNA, 423 bp, Lilium asiatic
ccgggacggaacgggcgggaccaacgcgtcgggggcacggaggaccggccatgggaatgatgttaggtgggggtgcagcagctgcagcacttgcgtatggcgcacatcaaatgacttctcatcatggtggtggtggacatggcggtggtggacatggcggcggttttctcggacacggagggtcacatgaaatgtcacatggtggaggttatggaggttatcctgggcacggagggttctcaggacacggaggttatgctgaacatggtggtcacggtcatggcggtcatggccatggcaagttcaagcatgggaagttcaagcatggaaagcacggccaccatggcaagttcaagcatggaaagcacggccaccattgaacatgttaccatcgcacttgaacttggtttctagtacagatga

SEQ ID NO: 3540 - DNA, 393 bp, Lilium asiatic
tccgattggccctgcccgcctctttggtcacggtggcttctaccgcaacctcgtatggctcttgctcgttggagccctcctcccggtaccaatctgggtggcaagcaagctctaccccgacaagaaatggatccccctcatcaacattccggtcatatcttacggcttcgccggaatgccgccggcgacgccgaccaacatcgccagctggctcttcacagggaccatctttaactacttcgtgttcaggtatagaaaggggtggtggcaaaagtacaattatgtgctctcggcggctttggacgcagggacggcatttatgggcgttttggtctttttcgcgctgcagaatcaaaatcataatttgaagtggtggggtatcgagattgatca

SEQ ID NO: 3541 - DNA, 426 bp, Lilium asiatic
gcggacgcgggtttttttttttttttttttttttttttttttttttttgatgacaaagcggttattgtgaaagatcacacataaaccgaaaactagccaccaagtacagaaagatcacaatctaagaggcctaatgcaaagtaaacatctaataaacccaaagaggcagagcctaggctttcttgggggtcttcttggtgatttggcagctttcttggtagattttggggtcttcttcggggacttgggggtttcagcaaaatcagccttttcagcaacctttttggggagccataccgggttgatattggggatgaaaccacctttagagaaggggaccccaaccagcaacttgcttaacttcttgtcgattctaaagggcaaaaaacaattgccttgggatttttcaggattttttttgtttct

SEQ ID NO: 3542 - DNA, 349 bp, Lilium asiatic
  modified_base (90)..(90): a, c, g, t, unknown, or other
ctaaaacaccgactcccctctctccgccctttccggccaatggcgtcctccgccggatcggcgaccccgccgccaccgcccgatgtggancaccgccctttctccgtactcttcgtctgcctcggcaatatctgccggagtccagccgcggaggccgtgttcagagaaatcgtcgagaagagagggctggagttctcgttcaagatcgactctgccggcaccatcggctaccacgagggtaatcgggcggattcgaggatgattgcggcggcgaagaggcgggggatcgaggtgacgtctatgtcgaggccgatacggccgtcggatttcaaggagtttgatctcatac

SEQ ID NO: 3543 - DNA, 120 bp, Lilium asiatic
atgattaaaatatggtattcctgttgccgggccgaacgtttaacctttgaaatatcgagagaccatatgggcgcggtactcgaattcaacacattgtgtattttaggggtaagcgttcat

SEQ ID NO: 3544 - DNA, 268 bp, Lilium asiatic
cagaagcaagtaacagcggagaagggcgagactattgaggacccaaaacataggaagctcatgagagaactaagatcctgacaagcaggagtaaaaaactgagaatctttcttgaaatggatatgacgagagatgcgaacatgatgtgccgcagaagcgtggctccaataaccatggttctctagactgatgtcaagatagaccaggaaacaatatgggaagaaagttggtcgcactcatgaggtggaagggcaaaacaacgacatcc

SEQ ID NO: 3545 - DNA, 415 bp, Lilium asiatic
  modified_base (14)..(14): a, c, g, t, unknown, or other
cggaatggacggancggaccgacgcgtccgaaagagggagatatggcgctgaaggtgtatgggttgcctccgtcaaccaacacagtgagggtgggggctgccctgttggagaagaacttggagtatgagttcgtcctcgtcaacatcaccaccggtgcccacaagcaacctgatttcctcgcactcaacccattcggtcagatcccggttctcaccgatggagacatcaccctcttcgaatccagagccatcaccaaatacgtagccacaaagtacgctggaactggccctgacctcctcggaagtgccagccccgtagctgcggcagctatagaagtatggctccaagtagagtcacaacagttcaacccacccatttctgccatcgtcttcgagctgctgatcaagccgatgc

SEQ ID NO: 3546 - DNA, 390 bp, Lilium asiatic
cttttcctagtgtccaaaaaggttcatacaaaatagttaactatttggcgaatacacgccattgagggcacacaatgttcccctacaaaccccaatacatgatcatgctgcggtgcctaaaaaattgggaacttcttgaaattagatagcatgctcatgtaaaatcttttacaatcaactgagcttaaaacactgcatgcacagttcttcgtaacaaaattgcacacatgtattcaactaacagacattatcctgagaaaaagtatgatctatggattaaaactaaagcactggtaaaatatattatgtctaaaataaagctacatgaaattgctcaacatacttcataaacagtgtataaaaaatgcaagatattttctcgaagaaaac

SEQ ID NO: 3547 - DNA, 314 bp, Lilium asiatic
atcattttgctgtggtattcttgttggtgggccgaacgtttaagttttgttatggcgagtcgtcaggggtttgcgggattcgaagtcgacacattgtatatttgaaaggtaattgttcatcgggtcgcagcactagagttttacttggtggttaacatgatgtccaaattcttctttccctcttatgcaataagccaaacgaccccaagaaagttaagtctaatagagtcacatttttatcttatttagtgaggtaaattcagtatagctatgtatcttactttataaaggtttttccatgataaagttttttc

SEQ ID NO: 3548 - DNA, 326 bp, Lilium asiatic
cccacgcgtccgcccacgcgtccgcccacgcgtccgcccacgcgtccgcttcgagccgaggacaggtggttgaagagctcagacaagtacttggctaagtgtgccgttacatctatacttttctctggcatttggaagcgatgtatgatgtcgataatcaagtgcctttttccttgttactgtagcagatgtagatacatggtaatgttgagggggagatttagaaagttttttagataatagctgactgggaattttatttctaatgtaaattgtttacttttcgtacataatttattccgtcttaatttattttagattttact

SEQ ID NO: 3549 - DNA, 357 bp, Lilium asiatic
cctgatctgagtcatgtgatctcgaagcctgatgcttcggcctcagcacaggatgatgaagatgttgatgaggctggggttgagcctaaggatattgagctggtgatgacccaagctggagtttctaggccgaaggctgtcaaggcgcttaaagctgcggacggtgatattgttactgctatcatggagttgaccaactgatggcttttctgagagatgtcagcttcgtcttcttagcctatttgctttggtttggttacaaggatagtgtgggctgaactctgttgttttgcaactttgttttatatctatttcagacatggttgagttgtataagttgagattggaatccattta

SEQ ID NO: 3550 - DNA, 215 bp, Lilium asiatic
  modified_base (122)..(124): a, c, g, t, unknown, or other
cagctgcaaggcagaaagctatggtggttgtcatgaaggtatattgggaacaccccaagcaccagctatgtgaagccattgataacatccacttgagcagtattgtcattggaaataggggnnngggttttttttttttggtcttctggggagaggagcacccatgtggtgaataatggtaattgtccagtcacagttgttaagagctctgatca

SEQ ID NO: 3551 - DNA, 308 bp, Lilium asiatic
acccttccggggtcgcggggacggacacgggcacccaaatgtcgcccctgtttgccatgaaatcatggcgtgacccgaaggaaaaggatgagtcaaactctgaatataaacactatgatgaggatcgtgatgacgacttccatgggcataccagagcatggatggctgacaacaaattcaccagctgctatggacagatagagaggaactattgtacgatgtacatctatgaggtacatgacataatcgcttgctgcgaactcatacactgtattgactatatttcgcacccactcacaagcatgaag

SEQ ID NO: 3552 - DNA, 298 bp, Lilium asiatic
  modified_base (94)..(94): a, c, g, t, unknown, or other
  modified_base (97)..(97): a, c, g, t, unknown, or other
gccacgcgtccgcttttgctcttctcgtacactcaaacataaggcagaatacatagcgtgggatgcgtgttatgcagttctactcccacatgancanccactctcaacttgtaatgtatggatcctaagggagtctggttggaccaaatttgatattgataatactctcttcgagcgtctagaagatcccatctttcaagaccgtgcaaacttctctacaactatgataaatggtgagatactcttattttatcaaagtactgaagataaaattcgtgccctctcctatgatttgggg

SEQ ID NO: 3553 - DNA, 336 bp, Lilium asiatic
ggccacccgcgcagctcaccgccttccagtgctacacatatcaagctgggacacccagcccactttcacacaggaggaggaacccgccccgcgctatgaagcaggaagcacctagccaagagcacctggcgagagggcccctgcgcgggcttcgcctgatgaaagcagattcaaaagcccgacacccccagcacagaagagagagatctggcacggggcgtcgggccgagtatgcttcatgagaacacagagaagagtcaaaagagacatgagagcaggaggaagagcccattcttcgtgaggtgtgatgagaatatatgacatggatgatgtctg

SEQ ID NO: 3554 - DNA, 374 bp, Lilium asiatic
cggacgcgtgggcggacgcgtgggaaaaaataaaaaaaaaaaaaaaaaaaaaaaaaaaaagaaaaaaaaaaaaaaaaaaaaaaaaaaaaaaaaaaaaaaaaaaaaaaaaaaaaaaaaaaaaaaaaaaaaaaaaaaaaaaaaaaaaacaaaaaaaaaaaaaaggggggtgtttttttaagaatttaattttttttaccccttttttaaaaaaaaatagttttttttatagggccctaaaataaattaatggggcggctttttaaaacttttgtaattggaaaacttttggttaaaaaaatttaatttgtttggaaaaaatatttttttttaaaagtgggttaaaaaaaaaaaaggttttaaagaatttttttttt

SEQ ID NO: 3555 - DNA, 350 bp, Lilium asiatic
cggggttgtatgggaaggtgaggtatgtgagcaggttggagtttttgggggagtacgtgaggaggggggaggtggaggtgccggactttgtggaggatcatgatgaggcgctggagcgccggccgttgatggactatgggctggagacggacaatcagaggctgtatgatgcgccggcgatggattcggctgcgtctatgtactcactgcgatgcatatcctaggataaaaatcataggtctttgtgtaggtgtatgattagggatatcagtgaacttatgtagaatatgttatataatatctgaaagtttggacccttctaaatataataaagattagagttctgtgtg

SEQ ID NO: 3556 - DNA, 332 bp, Lilium asiatic
  modified_base (312)..(312): a, c, g, t, unknown, or other
tccggggggaaaggcaccagccgagtccaagagccattatgcagggatccatgccaagtatataagcaaaattccggtggcatcttacaagggaaagaagctgctctagagaatgaaaaatacttattagatgtgtcttacttctgttgaagtattggtctttcagcatggcagactctagttatatgtggtagggtcaattcgaagttttttttggatgtggatcttgtttatgttgcattacaagaattttctagtattgtggaacttactgtattgcttttgctgggaattttattgcattttttagtnaaaaaaaaactttttttttt

SEQ ID NO: 3557 - DNA, 320 bp, Lilium asiatic
ccgaggccttaacctacaaaacctaccctcaacaagccgaaaccatccacaaaaacttctacatcgacatcaaaatccatcccttctaggttgtaaaacattatacttccaaaactaaaaatcacattcactctaagtctcacttttttaaaattgatattttcactgacaacaaactttaagatattataccctcttcttacaactgcaatgttcctcatgttaatcacactgattaccatctcattgatattgctgattatacattttcgagtcatcttacttaaaatctaacactaatgaattacctcaaactttcc

SEQ ID NO: 3558 - DNA, 313 bp, Lilium asiatic
  modified_base (221)..(221): a, c, g, t, unknown, or other
tcgcttctcccatattatatagcttgtcttttatttcttagactccatccatgggtctccccaattgaatcttctgtattttgtttcttcactgtctcgttatggctatagttttgcatagtaaataaactgaactgaagctatctatatagcagcaagtgttgatttaattacttactttagacaataattatattaattacaccaatttataagctctntatctatctatctagctagggaaaattaaaatgtctagcagaaagtccaggcagcaatctgcatccacaaggatctccgatgaccaaatcat

SEQ ID NO: 3559 - DNA, 419 bp, Lilium asiatic
cccacgcgtccgcccacgcgtccgttgaatcaacaatcatgtcggacgaagagcacgatttcgagtccaaggccgacgccggagcctccaaaacctaccctcagcaagccggtaccatccgcaagaacggctacatcgtcatcaaaggccgcccctgcaaggttgtggaagtttcgacttccaaaactggaaagcacggtcacgctaagtgtcactttgttggaattgatattttcactgccaagaaacttgaggatattgtgccctcttctcacaactgcgatgttcctcatgtgaatcgtactgattaccagctcattgatattgctgaggatggatttttgagtctgcttactgaaaatggtaacactaaggatgacctcaagcttcccactgatgagagtctgctcactcagata

SEQ ID NO: 3560 - DNA, 334 bp, Lilium asiatic
cccacgcagccgattcatgaaaggaaaacctcgagagcctaagtgtggcttcagtcgcaaagtggttgaaattctcaagcaagaggaagggcacttcgagagttttgacattctctccgacgacgaagtccgacagggcctcaaggtgttctcaaactggtcgagctatccgcagctctacatcaaaggggagctgattggaggggccgatatcgggttggagatgcagaagagtggagagctgaaaagcgtgttaaccgagaaagggattgttccgaaagaaaccctcgaggacaagttgaggaaactgaactccttggaacctgtgatgctc

SEQ ID NO: 3561 - DNA, 418 bp, Lilium asiatic
ggacaaacaggccgtaacagaagcaaacttaaagaaggctggctaccacagatggggagaaattaattctcaaggatccacaagatccttccactccaaatgcagtttcatacaaaacagcagcgagagagaaactgataaggcagggatacaacattgttgggatcattggagaccaatggagcgatctcctcggaggccacagaggcgaaagcaggacctttaagcttcctaatcccctgtactacattcagtagttccttcacctctcaacaatctagcttgctcctatctatctatatgtaataagatgcgttcaaataggggcactagcttcactttatgttgtttcagctgtgtgtcaacaagtcatgtaagagacttcactatgttgttttctctttcgtggctttaataa

SEQ ID NO: 3562 - DNA, 421 bp, Lilium asiatic
cccacgcgtacgttcacgcgtccgccttaatctccgttttctcacgccattcccaggttcggggttggggcagcgagggctgcgttcttggcgcaacgtgcgagaggggaggagacgttggaggttcggcattggagaatgaatagcgacgcgtgggcgcataggaacaaacgtaaagcagcgatttcgtggcaaagcattgctcgttgagttgactgatggtgttcagaattgtaaaactaaacttataatctctctcgctttttttttttaaaaggattaattgctagttgaagttgtgtttctctgaatgttgatgcatgaaccatggattggtgaatgctgtttagtgttaaggtcatttgcactggactttattggtgactctagtgaaattgagagatgagctgaatgattattg

SEQ ID NO: 3563 - DNA, 82 bp, Lilium asiatic
gcgcttaaaacacaattttccaaaagccatacccctcttggggggcacaaacacccctttcgtgttttctagaacaactttt

SEQ ID NO: 3564 - DNA, 314 bp, Lilium asiatic
gactcacgagaacactgtctgttatcgaatttggctaatcgcacgacaatgactctgaggcattcattgacaccgttaatggtagcaacctgccagtgctgaccaactgcttaagcgatatgagtgaactggaggacagacctaatattgaatgtgatacgcctagcatgacgggtagacgaactgattgtatgcgagagctgcacggctgcttacgtatggaggacatcctcaaggctcttacgaaactatgcttatatgtctatctatacatatatatatatctgtagatatgatatactatagactcatat

SEQ ID NO: 3565 - DNA, 416 bp, Lilium asiatic
attcaacagttgaaaccctcgttgccttaaccctttacgccggaatctccgccagaggcgccggcggagcctttgtcgcaaaagtcttattagtcgagagtaatgggagcaaaggaggtggagcgggtggacggccggacaccaaaccagctgcggccactcgcctgctcacggaacttactcaaccgcgcccacggctctgcgcaatggtcacaagggaatacgattgtattggctgctgtttatggaccaaaagctggaacaagaaagggtgagaaccctgagaaagcctctattgaggttatttggaaaccaaaatccggacagattggaaaaccggaaaaggagtatgagatgatcctcaagagaactctgcaaagtatctgtctattaactattcacccaaatacaacgac

SEQ ID NO: 3566 - DNA, 414 bp, Lilium asiatic
atagcctattcctggttgcttctgtttttgtttttcatttcagaataggagccaatggctcatttgctgacaccaactcctgccactgctgcaacagctctcttcccgagagcccgaaagagcaagagccccctccattcttggaaaaatggttactttccaactccaagagtgtgctgcgttggccaccaatctcaacgatctcacacctcttccatctcttctgatcttgatcaagtccctcctccccttgacaaccactctcttcgtcgcaggacattgatggggttgagtggtgcggcaatgttggggttgagtttgagtgatgagcaaagtgcaagtggcgcggcaaggcgtccaccgtctccaccaccgacggagaaaaaagacccgaatgtgagtggtgttcaggct

SEQ ID NO: 3567 - DNA, 280 bp, Lilium asiatic
atacaattgactgcccgtctgtaatcaacgctttgactatgaaaacccttgcggaccctatcttaatgctcactcagcacattgtgcctgtcacaactggcactataatgaacagtcccgaaactgacggctttcccaacatgtgcgcaaccttaatggcgaatatgacacgccctctaacggcgcattattcgccgttgaagtctttgtttcgcaccacttcacctgtacactcgccagcaccctaaaggccaatactttagctttatttcctttcttc

SEQ ID NO: 3568 - DNA, 325 bp, Lilium asiatic
attgatcatgcgaaacaatcatttcctttaaccatttacgccacacttttcattaaaggctacagctattactacgtaggcgaagatttcttattagagactacatttatcaaacaaggtcaatcgtttattcagatgatcaccaaaccacctatatacactcttctgctcacccaacttactcatactttcccactgttctgatcaatgttctcctctatatactaatgcataggctaatgtttatacacataaatctggaacaagaaagcgtgagatctataagaaagcctctatcgatctcattcatacaacataataccta

SEQ ID NO: 3569 - DNA, 146 bp, Lilium asiatic
atctatattactccccctgtatcggcacattaaactcatcaattgtagtggatactctcagcattacctcttcacttgacaattccctatttcccattccttttactttctttcatttcttttttgccacgttcattcggcttttt

SEQ ID NO: 3570 - DNA, 416 bp, Lilium asiatic
aactcttgttgtcgctattatggcttctattgctttaggcgaatagttcggcttgggagggatcataggagcagtgttgatcgttgtgggactgtactttgtcttgtggggtaaaagcgaagagagaaagtttgcaaaggaacatgctgctattacgttcaccccagagcacagtggcatcaggtcctcaagccatgccaaaacatcactcactcagccacttctcccttcatctacggagaatgtctgatcaacaaaaccatgacttcaagctggggcaccattttttgggagagaaaaagggaaaaaggaggaaaaagaagaaaataatacccagttatacattattactactttgtgtcatgaagctttgtgtgtgtccgaaagggctttcatccttttttcttttttttttt

SEQ ID NO: 3571 - DNA, 417 bp, Lilium asiatic
  modified_base (409)..(409): a, c, g, t, unknown, or other
ggagttattccttatgtaggtctcaactttgctgtctatgagtctctgaaagattagttaattaaatccaacccatgggatctagttgaaaattctgagttgagtgtgacaacacgcctggcttgtggtgctgctgctggaactgttggacaaactgttgcttaccctcttgatgttattcgtcgaagaatgcagatggttggttggaaccacgctgcttctgttctaactggtgatggaagaggcaaagtcccacttgaatacactggaatgattgatgcattcagaaaaactgttcagcacgagggatttggtgcattatacaagggtctggtgcccaactctgtaaaggtggtcccatcgatagcaattgcattcgtaacatatgaggttgtgaaagacgttttangagttgag

SEQ ID NO: 3572 - DNA, 246 bp, Lilium asiatic
agagagggttatagagattttaaagtgaaggaagaataaagcgtctgttcgtgtgaaacaatggatgcacagagactactagaacaaccagctattattgcataattcgggtagcctaatctttaacagccatttttcgaaggaagatgaaaagatttcaccatctgctatctccacctttacgtcttatgttgaagagattgaatggcagaagatgtagttcatacaaaaggttcatcttcatct

SEQ ID NO: 3573 - DNA, 318 bp, Lilium asiatic
gtctgataattttgttagtacaaaacaagacatggatatggattagacattatatgtcgtttgcttctctcgtcctagttccaaatgaccgagaaagtttgtttgtttgcaaaaaaaaaaaaaaaaaaaaaaaaaaaaaaaaaaaaaaaaaacaaaaaaaaaaaaaaaaaaaaaaaaaaaaaaaaaaaaaaaaaaaaaaaaaaacaaaaacaccaaaaaaaaaaaaaaaaaaaacataaaagaaagaaaaaaccaaaaacaaacaaaagcataaaaaaaaaggggataggtttataaaattaccaatttttaaaggga

SEQ ID NO: 3574 - DNA, 355 bp, Lilium asiatic
gtctgtctgcattatgacccttaatgaacaatacaaataaatcttgatgcaacggaaaacagggaataatccaacgagtaaaaaagcctgagaaggaaaagaagtcaacagaaagaagacaaaagctcgggcggccaataatccggatgccagataaaatcttcctaaatacgaaggatccgtctgctatggcggcacgaagactaatatgaacaggattagccttgaaacgtacagcatagacatatcactggaacatccacacgtccaccctgtcatacgaatctcatgctaggccattggagtcatggacaactgcatcaactacatcttcgataaccttgctcaggaatct

SEQ ID NO: 3575 - DNA, 234 bp, Lilium asiatic
accacgcgttcgcccacgcgtcctaacagccttcaaaactgtttccttaagaagggcattgtacggaccaaaccgtgtcaagtacttgggcccattcttaggtgagcccccatcctatcttactggtgaattcccaagtgactatggttgggacactgctgggctttctgctgacccagagacttttgccaaaaaccgtgaactggaagtcattcacttcagatgggccatgtt

SEQ ID NO: 3576 - DNA, 378 bp, Lilium asiatic
tgccaaggcgttaaggtggaatcttgcacctgttagctgcgcagcacgaaactcgcgaaatctgcaatgctgcgagggattcatgaactgcaaagctaaatcaggcacaagaagaggcggaaaaggagatagcataatatcgtgctaagattgaagcttaatttcagcggaaggttgatgagagcagcggcgactctggtgctaatgtcaagcgtcttgaacatgaaactgatgcaaacatcgaacacttgaagaccgatgcgtcaatcatatcttacgatgtctgtcatatgcttttgaagcatgtgaccactgtgaagaattatagcgttcaacatgttgtgaggatgagaatggatcagaaagtattttccataa

SEQ ID NO: 3577 - DNA, 171 bp, Lilium asiatic
tcgccctagtacgattatcactcgcttcctactatcttacctacgatccaagcatcagtgccatggcgcaccactaggtggtctaactctccatcgcggcaaacccttctcacactcatacgatcacgctcttcttccgatatgcatacatctcacttctaaccttctact

SEQ ID NO: 3578 - DNA, 303 bp, Lilium asiatic
aacgaccgactcgaccgatgcattcggaagaacaagtcatcgacatctactatcgacaatcacacggactcctcaatgagggcttctccagatgttaccactgtgaaacgtgccggagccggcatggctgcttcaatcactggcctcaagcccatggctggcttctccacgacaacgaccacccctgacattacctccctcgctacgtaacggctatatagtgcaatgcctgcatgtgttgccacccaatggctagaagaagtctgagactctgtcctacctgacagaccttactgatacaca

SEQ ID NO: 3579 - DNA, 286 bp, Lilium asiatic
cccacgcgttcgcggtggtgatcgcggtagcgatgttcgtactgatgtcgtcgcagctgctggggcagctaccggtgctgaaccgcgtcgtcaagtacgcgaacatgcatacaagcgcaatctatatactaatccatgcgatcatgaatatcacgttgatcatcatcattctaatcgagattgatgtccatatgcatactgtctagctagatcttgttgtagaatatctgcttgttaatgttgatgaggaaccatatcatattagagataattgaatgctttttgg

SEQ ID NO: 3580 - DNA, 464 bp, Lilium asiatic
atcatgaatacggttgtcaagctctgcaaggaatgcaaaaacactctgtaccccaagttggacaaggagcaggagctcgtctacgcgtgccgcaactgtaactatgaggagaaggctgagaacaatgttgtctttcaaaagaagatatctcgccctgtagctaatgatgatgactctcttcctcgtactaagaatgctacatgtccaaactgccaacacgaagaagctttcttcttccaggagtactctgaagaagagaagaagaaggtgctgtgcctggtctgctgcaaagtgggctgtggtcacaagtggagaggttgaagcacattacagactttataattcaaggcaaaactttggttatttaactaaggattaagactttaaaattcatggcaaaactttggttatgtaactaatgattaaggcacttgcagtgtttccttaaccgctgtcgtactatt

SEQ ID NO: 3581 - DNA, 469 bp, Lilium asiatic
cccacgcgtccgcctagattcagccacagttgaaaaaaaaaaaaaagttgttcgagatggcacgtacgaagcaaactgctcgtaagtccacaggaggaaaggcacctaggaagcagctcgcaaccaaggctgcacgtaagtctgcaccaactactggtggtgtgaagaagccacatcgttatcgtcctggtaccgttgctcttcgtgagattaggaaataccagaagagtaccgagcttttgatcaggaagctccccttccagaggctggttcgtgaaattgctcaggacttcaagactgatctgcgtttccagagccatgctgtgcttgcattgcaagaagctgctgaggcataccttgttggactctttgaggatactaatctgtgtgccattcacgctaagcgtgtaactattatgcccaaagatatccagctggcaagaaggattcgtggtgagcgtgcttgatg

SEQ ID NO: 3582 - DNA, 329 bp, Lilium asiatic
  modified_base (66)..(66): a, c, g, t, unknown, or other
gcttcaatcaatcccctcaatcatcgtctctcgctctcagcaatggccggacgtggcaaggctgtncgctcggcagcggcgaagaaggcgacctcgaggagcagcaaggccggtctccagttcccggtcggccgtatcgcccgcttcctcaaggccggcaagtacgccgagagggtcggcgccggcgctccggtctatctcgccggcgtcctggagtatcttgcagccgaggttttggagttggctgggaatgcggcgagggataacaagaagactaggattgtaccgaggcatattcagcttgctgtgatgaatgatgaggagctttc

SEQ ID NO: 3583 - DNA, 150 bp, Lilium asiatic
cccacgcgttcaatacattgcgctacaacgtttcatatgagcggctagaacagagtggatcgggatgtcttaggcgcactcacgtgcaaatctccagcctcttgcgagctatgctacaacctgactggacgtactccacacgcgtaaaac

SEQ ID NO: 3584 - DNA, 287 bp, Lilium asiatic
aagactgctctgtctgtcttacattgttacttcagtcttttttcccccagatccatactcttgcgtctctgccacaatgcgggaggatactatgcatgctacccacatcaacttctaatattcaccccttctaaactcttataaattttcacctgtcgaccacaaacagctattcaccctttccatggttaccaatagagaggcgattccctcaaaaactgcattttcacctccactaccttctgtcaccaattgccatcataatctattatgtggtggttattata

SEQ ID NO: 3585 - DNA, 422 bp, Lilium asiatic
caccactcaaatgcatgcccccgaccttgtcagtggtcgcggagcacgactggatgaaggatcgtgccatcgcctactcacaggagcttcgtaaagtaaatgttgacgcccctgtcctagagtacaaggatgcagtgcatgagtttgccaccctcgatatccttttcaagtcaccacaggcgcaggcgtgtgctgaggacattgccatctgggttaagaagtacatatcgatccgtggccatgagttctcgtattagatggggaagaaaggtggtggtccgttttctgtatgttttgtagatttgaggcaggagcatcggtatattagtcgggatgtattctagtttttggttttttggtttaccaatgtggttgtgtagagatgacttggtgttcagttcttggtccgaggttggtaattt

SEQ ID NO: 3586 - DNA, 454 bp, Lilium asiatic
  modified_base (361)..(361): a, c, g, t, unknown, or other
gatgaaatgaaatggagttcccagacacgcgtttgtctctgagatcgagcttgacgttcggagagacgctgtgctcggtgttcattccgctcataggaatagtcgaagctttggttttcacattcgccagttgcttcgatttccaatctcccaagaagaataagaaacattcttctaccttcgatgacattctcaccctcgccgaggattctccatttagtgttaatgaaatcgaggcgttgcatgagttgttcaagaagttgagtagttctatcattgatgatggcctcatccacaaggaagagctcgcattggcactgttgaagaccaccactggcgagaatcttttccttgacagggntgcttgatgtcttcgatgaaaaaagaaacggcattatagaactcgaggaggttgtgcatgctctcagtatctttcatccttgcactcctctgg

SEQ ID NO: 3587 - DNA, 351 bp, Lilium asiatic
catcttcactgggccaagagcgtgcaaagaagctatcagggccttgtgccgagaacagctgcatcgagcctttctgcctacaaccatcctgggtcaacgtttcttgcttcacgccccgtctagcatcctccaccatggcaaagactcgaaagcaaaaatctgacataagtggtcaagtgagcccgtttccgcagcttgtggtggagccaactgatgcacgctcgaactcgtttgtcgggacccacgagtacctggcccccgagataatcagaggagaccgtcatgggagtgcggtggattggtggacgttcgggatctttctatatgagttgatataccgtaggacaccct

SEQ ID NO: 3588 - DNA, 374 bp, Lilium asiatic
ttcgccgctagggtttcatcgtagagctagccagaagctgagaagatggtgctcaagactgaactttgccgttgtagcggagccaagatctacccagggaaggggatcagatttgttcgagctgattctcaggtctttctctttgccaactctaaatgcaagcactacttccacaaccgcctcaagcctgcaaagcttgcctggacagcaatgtacaggaaacagcacaagaaggatatccatgctgaagcagtgaagaagaggcgtcgcaccacgaagaagccttattcaaggtccattgttggtgcaaccttggaagtaatccagaagaagagagctgataagcccggagttcgagatgctgctagggaagc

SEQ ID NO: 3589 - DNA, 354 bp, Lilium asiatic
cccacgcgtccgaaacagagcaagctcatcctagagttgtaaaaatggcaggggtctcctcgagggctctgtctagcccatgctaggctggcaaggccgagaagctggacccatcaacccccgaagtcggcagagtcagcatgaggaagaccgttaccaagcaagccttctcctgaagcccatggtacggcccaaaccgagtcaagtacttgcacccattctctggcgagcccacgttctacctgactgtcaagttcccaagtgactacggctgggacactgctagactatcggccaacccagaaaccttcaccagaaaccgtgagctcgaagtgatccactccaggtggccca

SEQ ID NO: 3590 - DNA, 453 bp, Lilium asiatic
aacaattccacaaccacattcaccctccaacaccggcaaaagcttcatcaaggtacatctatcgactctcttgtcccctttatgtctcatttggattgttatgtgtaggattttggaaaagcttggatttgtgtggcaaaatgaggaaaggatcaaagctcaagaaggaaaagagatgttgcaagcttgatgaggatgtgctctcagatctataagtacccctcctcccccatcggattgaaggaagaggtctcactccggcccgagtgggggagggcatattgttggccgtctttctctcggttttggaggaggcacattgggagagcatctacaagtgatttcggagtggagagctcatcatggttctcggttatgggtccttgctgagctttgagagagtcatgtaagtggagtttgcaaggtttgagtcttgttttatgatgagttttt

SEQ ID NO: 3591 - DNA, 372 bp, Lilium asiatic
  modified_base (226)..(226): a, c, g, t, unknown, or other
gtggagatgatttacaagtatgccatgcctgttccgaaagacgagtgcagcaaatctctccagcttggagtgagctttgctggtggttatgttgctggcgttttctgtgctattgtttcacatccagctgacaatcttgtctccttcctcaacaacgccaagggtgccactgttggtgatgctgtgaagaagattgggatgttgggtctgtttacacggggacttnctctccgaattgttatgattggtactctaactggagcacaatggggcatttatgatgcattcaaagtcatggttggcctaccgacaactggtggagttgctcctgctgctttgccgccccctgaagtcgcacctcagtgattcatc

SEQ ID NO: 3592 - DNA, 383 bp, Lilium asiatic
ccacgcgtccggtgggagatctcgatcgaggtcccccaatttaagagatagacaccggatagccacagagagatcttattctaaagggcacatattttccatatagagaccccattctggggggatatctcacaggagaccttgtggtcgcctgctgatacccacactggtgttgtgaaggcccggaaaatttatttattgtggcggttaactatggtactaccgcgagagagattgtaaagaagatcttcagaatatgtcgtgtggtcgaagttcgggtagttcgagagagaaggacggcggattctcgtgggtttggatgcttatctttcgagaaggatgaagatactgatgctgtcatacgagcaattgatcagactgag

SEQ ID NO: 3593 - DNA, 378 bp, Lilium asiatic
aactgactttcattgatcacaacaaacttcctatttgaggatcctaaaaggtgaaacagacactctactaggcgtgattccctactttaaccctaatacattatcactaaaaacgccataggaccctcctagtcaccaaaaccccagctaactagatcaaaacaccgaccaatcatcaataacatctatgccaatattcataccttacatgagctaaatgttatcttaatcttccatcttctgatacaaatcagggccaaaacaaattccatcaaagacatacttgaattagacattgctgcatgaatatacactttagcatcttataataacttattagcaagatccagtgcaagcaagctactttgcatgcctgtc

SEQ ID NO: 3594 - DNA, 409 bp, Lilium asiatic
aactattctacttaccttttctcttaatccaaatatcatcatctgaaacgatggctgccatggcaaccacaaccctctcttcaaacccgaaactctcatttttccacggaaagcccgttacatattcttcccgcgtcgcacccaccaccaagttattctcatccaaacaaggcacaatctccatgtccctaacccaacccccatacgacctccaatccttcaaattccaacccatcaaagaatccatcgtctcacgcgaaatgacgcgccgctacatgaccgacatgataacctacgccgacaccgacgtcgtaatcgtcggagccggctcggcggggctctcctgtgcgtacgagatcagcaagaaccccgccgtgagcgtcgccataatcgagcagtccgtgagccc

SEQ ID NO: 3595 - DNA, 409 bp, Lilium asiatic
cccacgcgtccgctctttttctcaacaaaatggggttcaattctagctagttctggtacgtcgtccgcgaccatgaacatggcgatcgcgcttctgttcatggttttcgcagtttcatcagctttagacatgtcaataatatcacacgacaacgctcatgcggatagggccacgaggcgcaccgacgaggaggtgatgtcaatgttcgaggagtggctggtgaaacacgacaaggtgtacaacgcgctcggtgagaaggagaagaggtttcaaatcttcaagcacaatctgcgcattatcgatgaacgaaactctctgaaccgaacctaccagttgggactcaacgtgttcgctgatctcaccaatgcggagtacagagccatgtacctgcgaaccttggacgagggtc

SEQ ID NO: 3596 - DNA, 425 bp, Lilium asiatic
gtacattgttatctatctatatagttctgaagcatacaatgtccctgattaaattttatggctgagatgttgaatccccaaatattaatagaaaaaataaaaaaaaatgaaaactactaaaaaggatgaagatagcaagaagagagcatggtgattcttacaacaaatcatctggtcctgagaagaaggcgaaacttgtaactactgctaccaagaaatctgatggggatggcaaaaaaagctcccatactgcgactccataccctaaacaggttggaaagaatgcttccaacaatgagaagtctaagcagcaagctcctaagccaagtactccgaaatctggtagtgctgtgacctgcaaatactgcagcaggacattccaactcggaaaatgctctgcaagctcattcgaaggctaagcatga

SEQ ID NO: 3597 - DNA, 450 bp, Lilium asiatic
gttgatcgaaggtgggtatttagagcttgggttcatctggtgcttatttcgtttcgagattgtagagaagagcactacgagttcggtgattagatccaacttcgagtacgaaattccggacgaggttgtgtcgggtgtagctgccctacttgacatcactcccttcgcaatggttgcccaaactattgttgggtatctcacggaaaagaaagataagagcttgagctctgataagtaatatgagctccttagaatctacaatctaatattaggtaagagctttataataaggtctgataagtagtgtgagctccttagaatctacaatgtaatattaggtaagagctttataataaggtctcatgacccctttgaggttataaggtctgataagtaatgtgagctccttagaatctacattgtaatattaggtaagagctttataataag

SEQ ID NO: 3598 - DNA, 472 bp, Lilium asiatic
  modified_base (459)..(459): a, c, g, t, unknown, or other
gatcgccttcactgggagtacagagactggccgaagaatcatgactgctgcagcacaacttgtcaagcctgtttcactagagcttggtggcaaaagtccccttattgtatttgaagatgttgacattgagacagctgttgagtggactctctttgggtgcttttggaccaatggtcaaatatgcagtgcaacttctcgtcttcttatacaagaaagcatagcggaaaaattcttagataggcttgctgtttgggccaaaaatatcaagatttcagatccactagaagaaggttgcagactcggccctgttgtcagtgaagggcagtacgccaagataaacaaaattatttcgacagccaagagcgaaggtgcaactattttatgtggtggtggacgccccaagcatctagagaagggattctatattgaaccaacaatcataacgaacgtgagcacctncatgcaaatctgg

SEQ ID NO: 3599 - DNA, 238 bp, Lilium asiatic
cgacccacgcctacgcacatgtcctgtcatttcttgccccgttgtcttccctctttgtgtctctatctctgattattgttctccttgatatcttactcaggattctggagctcatccattcatcacgctatatcgccgcctgtcataggcataattaaacacttttatagacgtatttatttaattcaatctatctgaattctcaaagcatacacaactttatttaatctgattcatc

SEQ ID NO: 3600 - DNA, 286 bp, Lilium asiatic
ctggacactatagctcacaccattgcctcacgtggctggactcacagaaagagggtttgcatgtatacattcgtttgtgaatcctacttattattactgacgatcagctataccaaagcgctactgtactagaacaagaatgacattgcggaactattgctctgcatctccaaaacttacactgacaagaaggacattcgttactgtcatcaacaaaacccaagtcaaagacactttactaaaagataactgagcagatcatgatcatgctgattatactatgggc

SEQ ID NO: 3601 - DNA, 320 bp, Lilium asiatic
ctcacgtctggcgaccaacctcgaagaatccagacaggcttgatgtgcaagatgagtggcgtggttagggctgcattgacatccaccactagcgtttgtgcacttgtgcagagaagccatggcctcctcccattgaggtgcttctccactgaggcacaacagccacctttgaattcaacaccccctcctcctccgttctttgcgactgaccattcagggtgtaatttgactctggaggatgttaaaatggattatgaccgcagcttttccctagtttcaacgttgttgcaattgcctactcgtgattcctttgaccatgc

SEQ ID NO: 3602 - DNA, 366 bp, Lilium asiatic
tcggccgccgcttgttcccggtcaggatgcttattattgctgctgggggttcttcccgatggagtgtgtagttggcagcttcagttctcctccgcagtcggcggaagaagctgctccttcggcggcggaggctccaccgtcaccgcctcctccgacacagcaaccggcttcttcactgcctaattggatgccggtggctgttgagaatggcgtggggagtgtgacaccggtggcggcggtcatcacggtgacgagatctattgctgctgttcctaacggtgtcttatcgggcaatggcactgtgaataagaaacggtgtcggccgatgaagtattcattgacgacgtgagaatgaggtggagtttt

SEQ ID NO: 3603 - DNA, 307 bp, Lilium asiatic
gtatttcttgctgatgtcaaagactcatgagtttatattatgatccatattaactccaacaagggtccttattggtcacatattatacatcagttgatcaagggccatgatgtacaaagcatcatgactagtgcctgacttaagactgaactgacacagatatatctattctacttgcccaaaatgaccgatttagcttatcgacagcgatggcagatcggcctattatgatgaacttcatccacatcaactgatcattgttcatgatacacgcatgtgcatcaatcaggctattgggaagacattc

SEQ ID NO: 3604 - DNA, 392 bp, Lilium asiatic
tgttaacaaagccaccggcctggctatcaagcactgcattggagcatctcaccctgttcgctgggtaccctacagccctgactacctcgacgagtcggtcctatggtcggagagcaatgacactggtgctggttatcgatgcatcagaatggcgaacaacatccgtctcaacttcgatgctttgcacggggacgaagagcatggtggggtgcatgatgggaccactgtcgtcctctgggagtggctcaaaggcaagaaccagatgtggaagattgccccttgggaggcctcatttcctactgcactcaacaatttgacacgcaatcccaccgtcaggatcttcaccaaggctgatgtgaactactcactctctggtcgtaatggagaagtcg

SEQ ID NO: 3605 - DNA, 331 bp, Lilium asiatic
ggagatgacaatgctgattctcattttggtggtggcggtgaggtcacagacaatgatttaaatgaacgaaccgaggaagacttgcaacttccaagtcagtgggagagtcttaatcaaaatgacgacagaaatggatttgatgactcgcttgaccagaatgagctcccaaaagataatggcctagctcgtaacttcatagttggcgatgactttgaagcaaccagttccgtggaagagtccatcaagagctctgacaatcaagttgcaacaggtgaaagtacacataacagtgaacatgacgagattggtaatgacctaagtgatgaaaccc

SEQ ID NO: 3606 - DNA, 318 bp, Lilium asiatic
gccgaatacaatgccaattgtcacttcaaaggtgacagtatggtaaccaacgacgatgactcggatagcatcaacgtggacttgcaacttccgcttcagcgcgcaagtcttaatgaacatgacgacagaaatggatttgatgactaccttgacctgaatgaactcccaaaagataatttcctagctcgtaacttcatagatggcgatgactttgaagcaaccattttccgtggaagagtccatcaagagctctgacaatcaagttgcaacatgtgaaagttcacataacagttaacatgacgagattggtaatgacct

SEQ ID NO: 3607 - DNA, 454 bp, Lilium asiatic
  modified_base (431)..(431): a, c, g, t, unknown, or other
  modified_base (448)..(448): a, c, g, t, unknown, or other
caaatctcaaatccctaatttcccatggcggcggtggaggcgaagaagatcacccttaagagctccgatggcgaggagttcgagatcgacgagctcgtcgccatggagtcgcagacgctgaagaacatgatcgaggacgactgcgctgatgccgtcatcccactccccaacgtcgcctctaagatcctggcgaaggtgattgagtactgcaggaagcacgtcgaggcggcgccgaagcctgagtcagctgatgccgacaaggagaacgcggacttgaaggcctgggatgcagagtacgttcaggtagatcaggcgacgctcttcgatctcatcttggctgcgaactacttgaacatcaaaggactccttgacttgacttgccagactgttgctgatatgatcaaggggaagacacccgaggagatccgcanaaccttcaacatcaaanatgatt

SEQ ID NO: 3608 - DNA, 279 bp, Lilium asiatic
ggcgatgagcttcgcggatctggaggcgggccggccgctacccgggcggcgggatcaagtcaacgggacgcaggcggtggccgccggcgtgttccagatcaacaccgccgtctccaccttccaccgcctcgtcaacaccatcggcacccccaaggacacccccgaactccgagataaactgcacaagactcgactacatattgggcagctagtgaaagatacttcagctaaactcaagcaagcgagtgaaacggatcgcaatgttggagttagtacaac

SEQ ID NO: 3609 - DNA, 368 bp, Lilium asiatic
ctggtacgcctgccggaccgactcgcgttcgaggcggcgtccgctcccacctaaaagaaccgtcagaataaatttcttgctttctccctcaccaaccactacgggccaggcgaggatctagcaaccttcatcaccctccccccacaatgtctgccccggctccctccacgatccaacgcggccaggtcgatctcgtcgatttcgttgactggagatgcgtcgagtgcctcaatcagaacttcgcccacccccttgccaacgcgctgaagcagggttacagagaggatgaggggctggagctcgtgagcgatgcggttgagcagcttttgattacattccttttattcaagttgtaaagctgcattcaa

SEQ ID NO: 3610 - DNA, 185 bp, Lilium asiatic
cccacgcgtccggaagatgagaaagcaatatattttaaagttttggaattattgatttgcagcggttcctgagaagaaacatcaaatttggagccattgtttgtgtaatttccgacggtgtggatgatgcggttacccttaccaacttactgcattatttcatataaacattactgtattacttg

SEQ ID NO: 3611 - DNA, 425 bp, Lilium asiatic
cccacgcgtccggcatgtgctccaccaagcacgacgaggaagaattcatgagagcaaggatccatgtcttggagagggaggtgagggagctggcgagcgcgagagagcgggagacgagggagtacgagcagcatttggtgttgctcgccgtggaggaggagaggaggaagaagacggagagggtgcggaggagggacactgatgtgaaggactgcgagtgggagtattatcaggcgaggcgggatatcgcagtggagaagtggaagcagctatacttagatatcaagatggagctcgatgatcttattcagatgacccgagaaggtgggagattttgctgggaagctgaagaaggcataatagaagggctgagacgggagatgaagatgaaggaggaagtcatggaagcactgagatcgcgcatt

SEQ ID NO: 3612 - DNA, 121 bp, Lilium asiatic
ctggtccggtggttgcgaatggtgtggaagggaaagaatgtcgttgtaactggcggcaggatcatcggggctaccaacccggcggagtcggttcccggaactattcgtggggatttttcga

SEQ ID NO: 3613 - DNA, 432 bp, Lilium asiatic
  modified_base (340)..(340): a, c, g, t, unknown, or other
gaaacctcacaattgtttattcgcaaagaatggataatcgagcattgggagcagaactactatatcagtgcactagcaggagccaacaatggcaattctttggttgtgatgacaaaaggtacagaatatacacagcagtcatacaaagttagtgaaacattccctttcaagtggatcaagataaagtggaaggaaggcttttttgtgacatacatggccacatcatgaagcacatggacagatgacgcgtcccggaatgcaagctttacacaacaggttattgagctggacttcttataccccagtgaaggtgtccatcggagatgggatagcggatatncgataactgcatctgctgcaacagtggatcatgcttgcattgctctgagcattccaaagaagagaactagtgatgaaacgcaagagacactt

SEQ ID NO: 3614 - DNA, 307 bp, Lilium asiatic
  modified_base (181)..(181): a, c, g, t, unknown, or other
tcgccgggctcccacagaaatgtggtgttagcatcccctatgctgtcagcccatccaccgattgctctaaggtgcgttgagccaatctgctacttttgctgcttaaaaatattgttcggaataatgcagactttgtttctgtacaaggtcgtaccagtgttcattgagggtgtgatgtcgntgctgcttttctatatttttatgttgctttttcagcccatattttactgctatgtaacattgtggtgtcgtaccattgcctatgaagtatgagttgctggttaccataagtcaaagcactctttgt

SEQ ID NO: 3615 - DNA, 286 bp, Lilium asiatic
gtgagcgctaaagatgcattttcagttgaatttgagtttgaggatgatgatatcggggggggtctggacactggcaggaagggagaacttggtagggcttgccctcggagacagataaacgggtgctctataggaggtggcattgtattcagggcttgcccttggagacagataaacgggtgctctgtagaaggtggcaacggacgttccatcaaagatgccgacgacgctgaccgttgagttgagtgtttttgttgagctagtttgatgctcgcgaatgtttcaa

SEQ ID NO: 3616 - DNA, 452 bp, Lilium asiatic
  modified_base (369)..(369): a, c, g, t, unknown, or other
cttctgaggcttcttattcagaacagaatagcagagttccacactgaactcgagcttctggcacccaatgccttggagaacccctgcatcaagcatgcagttgagctagaagcagtcattcatggaaggggcttaatatcgagtcctgggtgcccggccgtctggtcctgatgaggcttatgtgtacttcatggaatgtgtagcggagacagtgagagatgaaatcgctgggtgcagcgagaaagcatatgactacctttcggtagatgatgcgaaaaggataatgatgttcacttctgatcaacagctctctgaatatatccagaaggaacaccctcagtgggagatgaaggatgggaaggtgttctntcagcttacgaaagacgttcaaccgtgcaaggaaatcccctcgcttcaactcattaaccagactttgagctatgcgagggagt

SEQ ID NO: 3617 - DNA, 385 bp, Lilium asiatic
cggacgcgtggcggacgcgtgggctagctcgaccttcgacgccaccgccgcacagtcaatcgccgccgcgccgtcgactcagttccatttctctaagcactcgatcggaaggatttgaagagaggaagatgccgacgcttgagatggcgctgcccccagagctgaccaacagtgtgatccgactgtatcgggagtgtctgcgaagagctcgtttcgtcggccatcagcaacacaacacaccattggtcgtcgacatggttagacagcagttcaagaggaatatgcatgaaacggatccagagaagatcgagcaactgaaggatgcagcaagaagaggccttattaatcacatgttgcacacgtctgaggagattacaggtcgcaa

SEQ ID NO: 3618 - DNA, 449 bp, Lilium asiatic
atgcaatccgggctgaggttcgagccttctttgatgtgcacgagcaggaagggagccaccctggtggagtacacttggagatgaccgggcagaatgtaaccgaatgcattggtggatcgcgaactgtgacctttgatgacctcggttctcgctatcatacccactgcgacccaaggctgaatgcctcacagtctctggaactagccttcataatagctgagcggctcaggaggagaaggatcagcgcccctatatctgatagactgagctccctaccccttgcaggattttaatctgttggaagctggtgagttggttggtgtgggatgttaggcatggttgagtgagttcttgttgtatctgtagttgacctcgtgtgtttgagactttctccttaagtgtatttatatcctataggtctcatatatttaagaaataagagtttgatc

SEQ ID NO: 3619 - DNA, 338 bp, Lilium asiatic
gtcatcaccgttgtgagagaaaatgaagagaatgaagcagtggaaggatatctcacttcatccaacaatctgtctaggacattggaaccagaagctccatcagtcaaattagatatgcagtatacaggcagtgaatgtgcagacaaaacaacctccactgcaggaccatatagttcatatactgatactggcacgttgccagtaacaattcagaaaaatgcatcggttagtgttttctctggtgattgctccaaggaattagctgacagttcaagtgatattgtacacgtgaagaatgaatttggtttcttttccaatatcgagcaacatgtagctga

SEQ ID NO: 3620 - DNA, 194 bp, Lilium asiatic
cataaaaaaaaaaaaaaaaaaaaaaaaaaattataaaaaaaaaaaaaaaaaaaaaaaaaaagggcggaaaaaaaaaaagggggggggggctataaagaaaaattcatctggcttcccctctcaagcttctcattttctttcccttggatacccctaaatacacctaatttaccgacccttaaatacatttcccc

SEQ ID NO: 3621 - DNA, 398 bp, Lilium asiatic
  modified_base (346)..(346): a, c, g, t, unknown, or other
  modified_base (349)..(349): a, c, g, t, unknown, or other
  modified_base (394)..(394): a, c, g, t, unknown, or other
tgagcttctcatccgcaagctccccttccagcgtctggtccgggagatcgctcaggatttcaaggccgacctccgctttcagagctcggctgtggcggcgctgcaggaggcgtcggagtcgtacctggtggggctgtttgaggacacaaacctgtgcgccattcacgcgaagagggtgactatcatgccgaaggacatccagctggcgaggaggatccgtggggagagggcctgatcatgttagggtgtctgattcgtatcttgcgaatatgttggttgggctgtgtgcttttagatgtgaagttgtttgttttgtgtaatggatgctgttgttaattttgttggnttnaaaaaaaaaaaaaaaaaaaaaaaaaaaaaaaaaaaaaaaaaaaanaaaa

SEQ ID NO: 3622 - DNA, 147 bp, Lilium asiatic
cccacgcgtccgcccacgcgtccggttatcaggaatgatggacttgttgatggcaagttttttctgtcgtctgttatgccattgcatgtaaggaagacatactagtttgttatgctgattcttattatggtttaatgtcttgttttc

SEQ ID NO: 3623 - DNA, 432 bp, Lilium asiatic
  modified_base (387)..(387): a, c, g, t, unknown, or other
gggagcgctaaagatgcattttcagttgaatttgagtttgaggatgatgatatcgacggtgatctggacactgccatcaagaaagagcttggtagggcttgccctcggagacagataaacgggtgctctataggaggtggcatcgtattcagggcttgccctcggagacagataaacgggtgctctgtagaaggtggcaacggacgtcccagcaaagatgccgacgacgctgaccgctgagttgagtgtttttgttgagctagttggatgcttgcgaatgttccaaagaggaacggagttgcgaatgttcagagttttttccgtgaaaatttggtttgtacatctgagtttaatttgcatgtttagcacctgttgatgttacatggngctggctcaagattgtgtctggaaatgataacatggtcattttcg

SEQ ID NO: 3624 - DNA, 382 bp, Lilium asiatic
  modified_base (368)..(368): a, c, g, t, unknown, or other
  modified_base (377)..(377): a, c, g, t, unknown, or other
ctcacgctctcgatctcgattctcctctcgccgagatgtcgtcgaaggaggaaccgcggatctttgtcggcggtctctcatgggacacgacggagcgccacctgcaggatgccttcagccgcttcggcaagatcattgacactcagatcatggtggagagagaaacaggtcgccctcgaggatttggatttgtgacctttatagatagacgtgctatggaagatgctattgctgagatgcatggtcaagatttgggcgggaggtctatttcagtgaacagggcagagcctaggattggttctgatgatcgtggctaccgtagaggtggggctactcatctggcggtagaggaaagctaccgggtggtngatgtcttncatct

SEQ ID NO: 3625 - DNA, 420 bp, Lilium asiatic
  modified_base (22)..(22): a, c, g, t, unknown, or other
cccacgcgtccgcccacgcgtncggccgcccacttgttcccttctcctctcagcttcgttcactccgtctcctcagctcaccatgggcaagatcaagatcggaatcaatggattcggaaggatcgggcgtctcgtcgccagggtcgcgctccagagcgaagatgtggagcttgttgccgtgaacgatccgttcatcaccaccgattacatgacctatatgttcaagtatgacaccgtccacggccaatggaagcaccacgagatcaaggtgaaggactcgaagaccctcctcttcggtgagaaggctgttaccgtctttggtgtcaggaacccggaggagatcccatggggcgaggctggtgcggactatgttgtggagtccactggtgttttcactgacaaggataaggctgctgctca

SEQ ID NO: 3626 - DNA, 285 bp, Lilium asiatic
gaaaagaagaaaggtcttgttgactggatgaacataattaagcctgggaacgaggagaaggaacattgggttccagatgaagcagttaataaatgcacatcatgtggaaaagattttggggcctttctgcgaaagcatcattgcaggaattgtggtgatattttctgtgataagtgcacccaaggcaggactcctcttactgcagatgagaatgctcagccggtccgagtctgtgatagatgcatggcaaaagtttctcaaaagttgagcaatgcaaaggaaact

SEQ ID NO: 3627 - DNA, 440 bp, Lilium asiatic
  modified_base (409)..(409): a, c, g, t, unknown, or other
cggacgcgtggatccaatacccaattttctagccgattgaattgcggaaaatattttatctaggtctccctttgttggaatagattgagtttacgttagggggttgatagacatacaaatttaatcccacaatggggaggtatatcttaccgatttgctcaaatatggaaagaacattctctattcccatctagctagttttgacatggatgccatggttgttatcacagtattagaatgtttgattcttgattacaattcttgatgcgtctcatgattgatttacatgcatctgtatgtgtgagagggatgttgaaaggcacattcaggtagtcccatattgggttgatgcatcttatttactttcttagatatggaaaaggcctctccactctcaggtagctaattntaaatttgatgtctcgatttgatgtctcaat

SEQ ID NO: 3628 - DNA, 452 bp, Lilium asiatic
  modified_base (256)..(256): a, c, g, t, unknown, or other
  modified_base (266)..(266): a, c, g, t, unknown, or other
cgaaaacaggatttaaaggtggtaaggtttcttatcagggcatcacaaataaaaagttaatatcttgggaggccttctggtccaatattgaaatggcccgttgggtctactgggtattgggtacccgtccccgtcataattggatttcatgaaaacagattggtcaggcaaaatagacgagtattagcaactgatgaatggctgagagtccatgaatgtgatggcatctatgctattggtgactgtgccacaatanatcaacgganagtcatggaagacatttcggagatctttaaggtagcagacaaagacaactctgggaccttaactataagagaaattcaagatgttcttgaagatatctgcgtaaggtatcctcaggttgagctctatttaaagagcaatcgaatgcgtgacattgtagatttgctcaaggagtccaaaggtgacat

SEQ ID NO: 3629 - DNA, 254 bp, Lilium asiatic
ccggttttgagaacgcactatttttttgcttcaatatcaatgttaaatcgggggagtgtatgtggcgtgaggggtattatgtaacttttgcatatcaatgcttttctgcatctgtcacagatccgatgatatcattcgttcttctttcaaaatgctatttttcatctgtgacacatccgaaaatattagcgttcttctcttaaaaatgggctgaattttaatattttttcaggggatcggatgatattttatgt

SEQ ID NO: 3630 - DNA, 320 bp, Lilium asiatic
cggacgcgtgggcagaacctcagacttcaactttagccacagtttcgatggagactggatcgaaggccaagaagggcgccggcggacgcaagggcggaccgaaggcaaaatcggtgagccgatccgtcaaggccggcctccagttccctgtcggcaggattggccgcttcctcaagaaaggccgctatgctcagcgtgttggctctggagctcctgtctatctcgctgccgtgcttgagtaccttgctgctgaggttcttgaattggcgggcaatgcggccagggccaacaagaagaatcggattgttccccgacatgtg

SEQ ID NO: 3631 - DNA, 438 bp, Lilium asiatic
  modified_base (247)..(247): a, c, g, t, unknown, or other
cggcgatcggctggctctggttgaggagatgctcgcagagtaacttctccatctccggcgtcgactcgaaacagctatgagacctacgttccagctaactgtgccactaccccagttccgtcggtcgccgtatgggcagaatctgtcgccgagataacccttgtcgaggacgaggcaccggattgagggaccggagtccctctcgagcttgttggggccgtggatctggcggcggcggggagcgtcngaggaggagaggccgacggcggcggagacggagaagtgggattcacattcggggatggtgcgggcccaggcccatgccgggaaggggtcggcggcggcgatcgcacctccgcagagcggcacgcgcacctctgcaggtcggcgggcggctctggagggaggggaaacctagatcaagattctttataaaca

SEQ ID NO: 3632 - DNA, 428 bp, Lilium asiatic
ttcaaggtttgccggttttgagatcgtcctatgttccggcttctatattattgttaatcgatcgttgttatgttttgtaaattattttgtgttgcgtttgcatatcaatgcttttctgcatctgtgacagatccgaggatatcagcgttcttctctcaaaatgcttttctgcatctgtgacagatccgaggatatcagcgttcttctctcaaaattgggctgaatttgtatttctgtcaggggatcggacgatatttttgtgattagacgagatttgtgtttattctcacaagatttgatttccttaggtatgatttaattgatgttctaatcccaatatctttgagatgcatttttcttttatatcagatgagatccgggtttctctcacaagatttgctgcgatggcacgagcggacagcaatcat

SEQ ID NO: 3633 - DNA, 458 bp, Lilium asiatic
ccagaacttgctattgatcccatgacagctgcagccatgtccattatttcatcgggagacgatgtcatcgcagaaacaataaatgtttcggctatggaaccaatcaacgaagatcctctaatgagtgatgtcttttacgagtgcaagaaggagcttttagcgaagtctgcaactggagaaccaatttcagatctatcagatgttaaatttcctcctcttcaagctgaggggtctcgaattgaagagaaaaatatgttggtttcaggactgatacaaaggagtatcagtactgggtgtttaaagtcggtggactgggcaaatggttgcacaatgaggccaaactttcttgattttcaagggctggacgttcaagctgtgctcgggatgaggagggcattcagtgaaggagacattcaggttaacacagataaagctcagtttggggcgtgatttttttt

SEQ ID NO: 3634 - DNA, 426 bp, Lilium asiatic
  modified_base (361)..(361): a, c, g, t, unknown, or other
cccacgcgtccgcggacgcgtgggctggaaacggattcagatctctacatatcgcgcaactcggccggatctgtaggtctccggaagacatctgggcgacgccggcgaggctcctctctccttccttcagaaaatgacaacttcaaggcgccttgcagacaggaaaacagcaaaattccagaagaacattacaaagagggggtctgttcctgagacaacagctaagaaaggaaatgactatcctgttgggccaatcctacttggttttttcgtctttgtggtcattgggtcgtctctgtttcagatcatcaggacagccacaagcggggggatggcctgaatacgaatgatagtgagactntccatgctctggtagtaccgaattacgttacaatgttaacctgaatattagagagattatgttaa

SEQ ID NO: 3635 - DNA, 449 bp, Lilium asiatic
cccacgcgtccgcatcaactcagagcatatctgatgaatgtggcgtgtatccaatctcctcaaaacgtagtgatttaacggtggcatcaagttctacagaggcttcatcctccttagcaagtaatgcactgaccctttctgattcttcattcccagtcaagactaccatggatgagcaagatatgattgacctcatgagcctcactttgtcatcaaactcaacaccacatctaacacctcctgcaccacagccctctatattgaatatgaatggacctccagtcgcggtctcccctaacggacattggtacactaaccctcattcgtacataccaaaccaagggtacaattcctataacagttatgttgctccctgggctcggccccaacctcagcctgaagttcctgaattctcaaccagttacccaccttcgccatgggaatttcca

SEQ ID NO: 3636 - DNA, 443 bp, Lilium asiatic
gcttgctcgacggcaactcgaagctgccaggccaccatctccatctctcatccagcgcctttgaaccttcggatctcgttctgggggtgattgaaggacagtgtttagaggacaaatgataaacaacctggcggtgacatagtaaccgtaacggctgatgtactcaccagagaaaaggcaccatagtgttctcaatacattgattgacagtgctccactactcgaacggttgaccctgtccaactgttctttctactcggggatgaacagttccatctgcatcttcgctcagtacctgaagctattggagattgataggatggattactgcttgcttgaccttgaagcaccggtactcaccaaactgaggctacatgacttggattacttggataacgtcgcggttgctgcttcttcccttctattcctaaacactagtgaca

SEQ ID NO: 3637 - DNA, 431 bp, Lilium asiatic
cggacgcgtgggtgttggtgtctcagccgacctgcttgtcggtcagaaggtgtatgccattgggaatccttttggtctggaccatacccttactaccggcgttatcagtggtctgcgtagagaaatcagttctgctgccacggggcgtcctatacaagatgttatacagactgatgcagcaattaaccccggaaatagtggtggacctctacttgatagttccggaagtttgattgggataaacacagctatttactcgccatccggagcgtcctctggtgttggattttcgattccagttgatacagtcagtggtattgttgaccagcttgtgagatttggcaaagtgaccaggcctattttagggatcaagttcgcgccagatcagtcagttgagcagattggtgtcagtggggtgctcgtcttagatg

SEQ ID NO: 3638 - DNA, 449 bp, Lilium asiatic
aaaaaagtcggtggattagaaaacaagacattatcatcaatcaatgaggcagatactgctgactacgaattaggtaattatgagctggcccaataccctaatatcaaaggttttgatccaatccatcagcaccggccattttgcccctggattgtaacagaaaatggagatggcatgccagggtggaaattgacactttcagcactgattaaccgagagaaagatgattcccaatcagaggcccctttgactccacttgatgaggaggatgatccccttgtctctgtacggaagcttttcatgtccccagcgaaaagattaaagagctcccaatgattatcctcaagattttttggagccgacaatattatatctttgtttagggagttagaaaagatttgaaggcttcattttggtcactttgcagctgtgttattccaaatctaaac

SEQ ID NO: 3639 - DNA, 430 bp, Lilium asiatic
aagttctgggccctcgccgccatcatcctcctcgctttctggtccatgctcaccggctccgtcacgctcaagtggtccgctggcaacctcaatagcctctccgacgaccttgacgcccccatccatgacgatctcgacgtcctcgagatggaggagagggagaaggttgtgcggcacatgtgggatgtgtacaccaatggacgccggatccgtctgccacggttctggcaggaggcgtttgaggcggcgtatgaggagcttgctgatgatgatccggaggtgagagatgccgcggtggctgaggttgcgaggatgtcgacgcggatgctagatctcgacccgcttcctcaccagcaccgaaaggctactgagggagagctgaaactaaggaacagagtcagccgggttgaggggaaatcagcaaccatgt

SEQ ID NO: 3640 - DNA, 169 bp, Lilium asiatic
cccacgcgtccgcctggatggtagagaacatctgaatctctattctgattgcaagtccatatatattatttgttatattagatgtaagactagtatcagtgcatgagtatgcattgttaggtgtaaaagaataactatgaattgttcttagtttcttgatttgtagtct

SEQ ID NO: 3641 - DNA, 454 bp, Lilium asiatic
  modified_base (433)..(433): a, c, g, t, unknown, or other
cggacgcgtgggatcaatctctcagctatcagaaagatgagtcggaacaacgggaaacaaccgaaggttgatttgaagctgaacttgtcggccatggggcgctcgaggggcgggccttctagggcagtggtggacgaggggtcaccgacttctccggcgatgtcgtgtgtgtcttcgatcagcccagattcgagcccggaggcggcgtcgatggtggtggcaggatgccctaggtgcctgatgtacgtgatgcttcccgaaaaggatccgaagatttgccctaagtgcaagagcaatgtcctcgtcgacttcaacaatgatgggaggagttgaacatccatgcatgggtcatggttgttacttgacttgtaaccctagatctcttgctaggattagcctctctctctttctctcccgggctaagcccatattntcttatcaaggttttatacaa

SEQ ID NO: 3642 - DNA, 281 bp, Lilium asiatic
atctaatccgtggagctggactctatcatcatcccgggacgaagagcctctctcaatcattttgacaagcatctagatctcgctctgataccacttgttagcaattgaagcactatagcacaaccaccactacaagtcacaatctcagcggcaatccgtctaacacaagtgaacaacaaccgccaacatcataacttgtaaacacacgtccacatatttactatatgttgccaaaacaaaccaaaggcacaccgccaacgtcgagcacaaagcaacaccac

SEQ ID NO: 3643 - DNA, 418 bp, Lilium asiatic
  modified_base (293)..(293): a, c, g, t, unknown, or other
caacaatgccgtcccacaagtccttcaagatcaagcagaagctggccaagaaaatgaggcagaacaagccgatcccgcactggatccgcatgaggaccgacaacaccatcaagtacaacgcccagcgcaggcactggcgccgcaccaagctagggttctgaggggcgaagcccgtaggatgcagtgctttcatctgtctgctggagctagggttaatgtatcatttccctattactgtttttataagactgttgattgtatactcttgttgagccctttcatttatgagttgngtggtgtttgtggatcatctgtatgttaggtgctttgatatgttttatgtccacttgcttaatgctcttttttatatttgatacatatattttttgagttaaacatgttatattgtagtttttcc

SEQ ID NO: 3644 - DNA, 56 bp, Lilium asiatic
tcttatcaataccttatcaaccatacttttatatttattcaaaaaaccttcctatt

SEQ ID NO: 3645 - DNA, 458 bp, Lilium asiatic
cctgactaagattgataggcgatctggaaaggaaattgagaaggagcctaagtttttgaagaatggtgatgctggcatgattaagatgattcccaccaagcctatggtagttgagactttctctgattatccaccccttggccgatttgctgttagggacatgcgccagactgttgctgttggagtcatcaagagtgtggagaagaaggatcctaccggtgccaaggttactaagtctgctgtgaaaaagaagtgagggttctgttttcttaatagtagtttagcctagccaatttactgagtttattttgtccttgtcatgtgtcttgtttgttttgtacttgtcatgcatcttgttttaacaaggtgcttgataggttgatgagtttatgtgtcgaatttacagtttggtcttattttgtcggtgtcttaaatgtttggacctgaagagttcatgt

SEQ ID NO: 3646 - DNA, 317 bp, Lilium asiatic
gatgtatattttataaaaaaaaaataaatttttttttagtgttatattaatatatagtgtatttttttaagtttattatttattattttgtttcttttatttatatttttttttttttgtttattaattttattttatttgtgttgtttatataaatttttttttataaaaacttgttttatcttaaattatatttttttgttttaattttcttttttttattgtttttttatattttttaaagtttttgtattttttttcttattaatattattattatgtatttttttaaattttatattatttttttttatttt

SEQ ID NO: 3647 - DNA, 313 bp, Lilium asiatic
gttgcttattttgtgttctctgttttaagctcggccatgtaagcttttcctcagaattacacctatctgttaacaacttttgaactaatgtttgttcttttgttgaaggccatacttggattggtgtgaaaacagtaatcttgggttggtacctccaattttatgtatttactgatccttaatttgaggtgggggttattatttgttgtcttttgttggtaatagtttttaagagtaaaaaagtgactgatatttaatgatatgtatcaaataatgtttgttgtatgtttaaagggaatcgttttgcattggc

SEQ ID NO: 3648 - DNA, 422 bp, Lilium asiatic
atttgttagagattaccccgacaaccgtcagtggtaatagacgtccatttgttattgagactgttaaagcggacgatgaagcaaaagcagggaaaggccgttctaagccagctcctaagtttattggcaacttactagcatttgtactgaacttgattggccctaaaggtttggaatttgctcggtattccttagactaccacactataagaaattacttgtatgtgaagcggcggtggggaaaacaaagagctgataggcatattccctcgtatgcaaagaaaattgtggaagcatataatgaaaatggtcaggttgatcaaatgctgtcagaaagttaaattccatttctgaaggtactcatttttatctgtaacatatagctctagagttaaacatgtgtattcatatatttcctcaat

SEQ ID NO: 3649 - DNA, 431 bp, Lilium asiatic
caattctcagtcgtggtattggttggcagggaatcggtattttgttggatggattatttggaacagctaatgggtctacggtgtccgttgaaaatgctggattgcttgcgttgacacgtgttggtagcaggagagttgtacaaatttcagcaggattcatgatcttcttttcgattctagggaagtttggagcagtttttgcatccattcctgcaccaatatttgctgctctgtactgccttttcttcgcatatgttggttccgtcggcctcagctttctacagttctgcaatcttaacagtttcagaaccaagttcatcttgggcttttctttctttatgggtttatccgtcccccagtacttcaacgaatacacttcggttgctggttacggtccagtccacactcgctcaagatggttcaacgatatc

SEQ ID NO: 3650 - DNA, 448 bp, Lilium asiatic
  modified_base (365)..(365): a, c, g, t, unknown, or other
gtggatctggtacattaggtggagccttacttctggaattatttactagagatggagtaggtactatggttgctagtgatgtgtacgagggaactcgggctgctaccgtgtcagaccttacaggtataaagcaacttatccaacctatggaaaaatctggtgcaggccagtgcaggtgtgatagaggtcagtgcagtggtaaacatttatttatgagataaggctttattatgtctggatgcttattgtacaagacatcaatcgcgatggcaactgagattcgaccgatcacacctgtgtatcggtttgaattagagaccgtcgtgccactcaggaggagctaggttctagcatgttggtgattntaattttgtctgtatgttgatacctaataaaatatgtttgaggcaaaaataattccctcgatgcaatgtttggtgagagagtg

SEQ ID NO: 3651 - DNA, 483 bp, Lilium asiatic
gatgatttgatgatcaaaaaaaaaatttttttaaaaataaaaaaaaaaattaaaaaagggggagattaaataaggggggggggggagaataataatattttatagtattaattatattaaaatttaatggttgaaagtatatttaattattatttgaggggggggctgttttttaatggtacttaatttttcttgctttgcttttcgatgtttgtcactctttttttttgtcccttagtttttttcctgtggccctttttatcatttgctttgctgggatatccttttggtttttctcttttttaatccctttttatacaatttcttttttttttaatttgggctttatttaaaaagaggtctttggccagttcgtcttttttaagattctgtgcactttatttggtttttttgctccccccttttttccgtttattttaaggggggttttttttttgttttctcccttttgggttttttttt

SEQ ID NO: 3652 - DNA, 223 bp, Lilium asiatic
aaattatcatgtgagtgaatttgaatggtttttgactgaattacaatttttaaatatgtaatacgaaacaataatattgaatttttcttaataaccctaaaatttcatatcactgtgaagtcagtctatgctacctttgtatagtaacaagtatcactaatataatttgtagtgatcaaaatttaatattatctttatgaatgaaaggtaaaataatgtatac

SEQ ID NO: 3653 - DNA, 362 bp, Lilium asiatic
cttggggtcaagtgctctaaagaggtggctactgcgatccgtggagctattattcttgcgaagctgtcggttgttccggtgcgaaggggatattgggggaataagattggaaagccccatactgtgccctgtaaggttactgggaaatgtgggtcggttacagtgagaatggtgccggcgccacggggcgctgggattgttgctgctcgtgtcccgaaaaaggtgctgcagtttgctggaattgaggatgttttcacctcttcgcgtgggtctacaaagaccctcggtaactttgtgaaggcaacatttgattgtctgatgaagacctacgggttcttgacgcctgatctgtggaaggagac

SEQ ID NO: 3654 - DNA, 275 bp, Lilium asiatic
ggcaccgttgtcaccgggtaaccatgtatagctaatagctcttttaccttatatgatagaatgaaaataaagcaagaaaatcaagaatgagactgaggaagtaaggatcttttacctgaaggagggaggtggtaggattgttggtttgttcctaagagctcgactgacaggcggtgatgcctgtgagctgcaaggtggtggtagagtaggtggttctctctgtaattttgtagtatcagagattcagaaggcttcttgtttgagtttcctttacc

SEQ ID NO: 3655 - DNA, 64 bp, Lilium asiatic
aaaaaaaaaaaaaaaaaaaaaaaaaaaaaaaaacaaaaaaaaaatttaaaaaaaaaaaggccca

SEQ ID NO: 3656 - DNA, 424 bp, Lilium asiatic
  modified_base (420)..(420): a, c, g, t, unknown, or other
ggaaaacaaacgaggatgcaaagagtagtgaatctgatcggaaaacaaatgaggatgcaaagagtagtgaatctgatgggaaaacaaacgagcccagtggtacaaagcaagtgctttgtgatgtgaaacaagtgcttcctacttcaacagaggccgctgatgataacaaaccgaagaagaaacgtatcacccctgtagccatcaactagggtgtgatgcttatggtgagcaagttttgtttgttaattgaccttgtccttgaaattcttattgacaaccctggcatcgaaattccaaatttcaacctgccacagttggcagaattgacttcattgttacagagatatcttttgtttgatatctgaactttctattcttatacttttagtaagttgtcattaatttttaggggaaaaaaanaaaa

SEQ ID NO: 3657 - DNA, 409 bp, Lilium asiatic
agtcgactggaattcgcctgatctacgacaacgttgagagcgccaagaaatatgagccaaagtatcggctcatcaggaatggactggccacaaaggttgagaagtcgaggaagcaaatgaaggaaagaaagaataggaccaagaaaatccgtggagtgaaaaagaccaaagctggagatgctgccaagggtgggaagaagaagtgaagggagctctttttacttcgggttttgtgtacttgttatcttcaggggattctaatgcatttagatttatcttctattgctttgtgctcttgagttttggcccgagttaaaattattaatgatgtagaaccttgtgacttttttctgttttagtctgtctggtaaaccatttcaatgacattggagctttgagttttttctcc

SEQ ID NO: 3658 - DNA, 458 bp, Lilium asiatic
  modified_base (441)..(441): a, c, g, t, unknown, or other
cccacgcgtccgcttttgctcttctcgtacactcaaacataaggcagaatacatagcgtgggatgggtgttatgcagttctactcccacatgagcagccactctcaacttgtaatgtatggatcctaagggagtctggttggaccaaatttgatattgataatactctcttcgagcggcaaggatgccccataagtgaagacggtccaaacttctctacaactatgagaaatggtgagatactcttattctatcaaagtactgaagataaaattcgtgccctctcctatgatttggggcgccaagtgatgaccaagtttgcacagtttgataagaagcctttcctaaattgccggcaactagggaggcacagtgaatttgaccatgtgaactctctggtctccctggcctcatttttctcaggttcagctccaacacatcnctccttcgaaaggatcc

SEQ ID NO: 3659 - DNA, 448 bp, Lilium asiatic
gtttccgggcggaaatagccctggcttcactggagcaaactaactgtgtttgtataatcctgagcaaacgtcgaaaataaagctggctggtgttgatgttcctttggggactccgctgggagctagtctcatattccatcgcctggaggagcggcgtcgccgcaattacctgttgggactggccatgagactaacatttgttttgatgaatttaattaaattttgttgctgaattctatttattaatttcttatcttatctcgttttttgtatttatttttgaaacatgatgtcatgaaatttggatgatttgggtggagttggcccatagtctgctcctgaagttctcctgcaacgatttaaatctgtctcaatatccttccccaagacaccattctatctttttttgtataatttaaattggagttatagtattaaaaagcttggc

SEQ ID NO: 3660 - DNA, 402 bp, Lilium asiatic
ccacgcgttcgcggacgcgtgggcttggagttcacatcctccccctttcgccaaagccctagcgatcaaatcaacaatgggtaaggtccacggatccttggctcgcgccggcaaggtgaggggccagacgccgaaggtcgctaagcaggacaagaagaagaagccgaggggccgcgcccacaagcgcatgcagtacaatcgccgcttcgtcaccgccgttgttggattcgggaagaagagaggacccaactcgtcagagaagtagagattgatggaggaatgtgtgatgttaagtctaccatgttgtttttaccattttgcttttaggatatgtgatttggatggtgtttgttaaacccagtttttatgtgagtttttaaagtagtaaacttcattttgaga

SEQ ID NO: 3661 - DNA, 383 bp, Lilium asiatic
caatgttgttttcctcaaagccgacgtccattaattgaagtcggtggccaacgattttgcgatagaagcaatgccgacctttattttcctgaaagaaggaaccatcgcgaaaaagtttattggagcccataaagatgatctgcccgaaaagatcgaacaactcctgagtggggattcatttcactctaacagggtctggacctttgcggataatggcccccatctttgctgatctggctaaaaagtttgtcaaatggtgttttacttaaagccgacgtcgatgaattgaaagaaggcacttttccagcttagttgatgaaaattttaatttcacgatattcgaacttgcatgatcctattgcagtcggtgggcaacgattttt

SEQ ID NO: 3662 - DNA, 450 bp, Lilium asiatic
ttcgagatcccaataaaatcagatccaagaatagagagaaagcccgcgcagagctagcccgcatccacgccgccgtctccattgccggtgttgctgccgcagtcgctgccatcacaacatccactgctgaccacacccccaaagtgaacaccgcaatcgcctccgctacgcagcttctcgcctctcactgcattggaatcgcagaaatggcaggagccagccaccaacaagttaccgcagctgttcaatccgcagtcgacgtgaggactgctggtgatctggtgactcttacagcagctgctgccactgctttgcggggagcagcagcaatggatgtgagaatgaagagggatgtgaggaacaacgcggccgtcctcccgtatgagagagggtgtggtggtcccgatatttggtgcaaagaaggggagctgctcaagcgtacaagtagag

SEQ ID NO: 3663 - DNA, 413 bp, Lilium asiatic
ctcgaaaatttgaggaattaaggcaagcagaagaggcagcccaaaaaattgccgcaatggagaaggccaagtgcaaggctgggattgaagctgctgaagcagcacaaaggatcgctgaacttgaggcgtagaagagaccgaatgcagaaattaaagtaaagcgtgaggctgaagaaaagaaaaaagctttggactcgatgtctcattctgaccttcggtacaggaagtatacaattgaagagattgaagtggcaaccaattacttctccgaggcacagaacatcggggaagggtggatatgggcccgtgtacagagcttctttggatcacacacctattgctatcaaggttttgagaccagatgcagcccagggaagtaaacaattccagcaagaggttgaggtgttgagctg

SEQ ID NO: 3664 - DNA, 331 bp, Lilium asiatic
ctaaaatcttcctaccgcccactgacaatggcaaccctctcctctgtgagcgggagctgtgcagcaccaatctccgccgccgggccggctctggcgctggcccggcgcctcctcaccttccctcgccggcagccgaccccgaaccaccctctcctttcaaaaactctccctcgctggacccgcggaagcctatgcacagctgcgcaagctctgaagccaagaggcagcggcggagcggagtcgttggcgaacggggtgagagaccggaccgtcgctgaggccgtcaagaacattctggaaatgattttgcgcacgagcatggcagttggcg

SEQ ID NO: 3665 - DNA, 294 bp, Lilium asiatic
  modified_base (119)..(119): a, c, g, t, unknown, or other
  modified_base (273)..(273): a, c, g, t, unknown, or other
gtgctgtggaggggatgctgccgctgactcatccggtggttgtcaaggccaagcttgtgtcgaagacggcggagaagaagatcaaagctgctggtggcgcggttgtgctgactgcttangttttgttattctctacttgtctgagcgttttagctttttagattgcgagatctgttcggattttgctacctgtttgagacctgtttttgaattgttttaatttgctgtttggatcttaattaagtttctgatgaagttgattttgttctttanaaaaaaaaaataaaaaataaa

SEQ ID NO: 3666 - DNA, 245 bp, Lilium asiatic
cggacgcgtgggcttttctggcggcgatcttggcattctcatcgtgcgaatcactcggttgagtgtcaagatgacgaccaccaaaattatcggagcggtggcggttttatttgttatcgcatatgcatgtgactacgtagtctctgtcaaaaagatatttggtggtaccaccccccacactgtcgctgacaaggagaggtgggaagcgactgattaagaagttttaggcgtggcctttgtctgtt

SEQ ID NO: 3667 - DNA, 338 bp, Lilium asiatic
attcaaaatggcgatgaagaagattccgattaattaccagggctggtgtagatcaattttacatgttggtgtatagagagatctttactataaagggacttggccagcaggtaggatgtttactgatcagccgtacatgtaactatttccattcaaatcatgtagttcgagccgaacggctttttatatatatatatatatatataatgtctttttataatagcaaacctgtgaatgcaactaagctctccacaaggtatcctctttgatggctatgaattactcagaaagataatgggaaaatcattaatgaaatgacataatatcatttttttttt

SEQ ID NO: 3668 - DNA, 479 bp, Lilium asiatic
tcgtaaaaaataattttaaatataaaaaaatatttttttttaaaattaaacttaaaaaaaataaagaagtaaaaaaaaaaaatatgggggggtaaaattttttaatatattaataaaaaaaaaaaaaaaaaaaagggggggccttttttaagattcaaatttttctttccctttttttcaacttttttatttttttttgtgggcccttaatttaattttattttccgcctttttaaaactttttttttttaaaaactttggttttccccaatttttttgtttttcaaaaaatttccttttttcaagttgtgttttttgcaaaaaattctgaacctttttctttttttaaaattttttcatttttatttgcaaattggaccctctttttttctgtttttttaaccgcctggggtttttttgttttctttcaatgtttatcctttttattttgtaaagcccttttaacccctttttttttt

SEQ ID NO: 3669 - DNA, 415 bp, Lilium asiatic
  modified_base (377)..(377): a, c, g, t, unknown, or other
gctggtcaaagatgcatggctctgagcacagctgtttttgttggggactcaaagcattgggaggatgagcttgtcaaacgtgccacatcactgaaagtaaatgcaggggttgaagctgggacggacctaggtcctgtaatcagtagacaggcaaaggaacgtatttgcagactaatccaaagtgggatcgatgatggtgctagggcagttcttgatgggagaaacattgaggttcctggatatgaagatggcaactttgttggaccgacaattttgggcgatgttacaagtgagatggagtgttacaaggaagaaatctttggcccagttcttctctgcatgcgggctgatagtctagacgaagctattcacattgntaaccgtaacaagtatggtaatggggcattcatattta

SEQ ID NO: 3670 - DNA, 289 bp, Lilium asiatic
cagggagaatgttctggaagcttgcagaaggctgaaacaactctacaaatgagaaagtgtattgacaactttctacctaccagaaactatttgctacaaagaagccagacaagtatttttttttctaatgtagtcgagacttatgattgaattggtacgcctttctgcatctaaaaaaaaaataaaaaataataattataatataatttttatatttataataataattattttatattaaatatattatttattttaattaattttatttttaatattataggggggg

SEQ ID NO: 3671 - DNA, 453 bp, Lilium asiatic
  modified_base (441)..(441): a, c, g, t, unknown, or other
cggacgcgtggggtgagggtgtcaagtatggtgctggtatcggcccgggagactacgacagtcattcccccaggatcccgtcgaccgaggagattgctgacaggatcaacaagatgcttgctgtgctcgagaccaacatcctctgggttaaccctgactgcggtttgaagacccgcaagtatgctgaggttaaacctgcgctgaccaacatggttgaggctgcgaagaagctccgcaccgagctggcgagtgccaagtgagttgcaccaccgcgccacctgtttactatggttttagattgaaaagcaaaggattttcctctcttaaataagatagggttgtgttgtctggagttgattttgggaggtggtatagtgtcgtagagttacctattttacctatttttgtattgcccgttggtcttatgcagttatctgccgntgtgtgcacttt

SEQ ID NO: 3672 - DNA, 402 bp, Lilium asiatic
aacaaaatctatggaagtattcccaagcagattacagaactgcaggggctgtacttcctgaatgtgagctacaacaggctctgcggcgagattccgaagctcgggcggtatgatcagtactccttcttccacaacaagtgcctctgtggaccaccgctggccgcctgcaagggccagtgattgtaatagtactcagttgttcgttctcttcggtgcaagacctagtgaacttagttgtactcaattgtgcctctcttctgtcttctacatctttctgagatgtaaggagcgtaataattgagatggccatctgtccgtctgttgtactattgatctcgtggttggtccattggtcgcttttgggaccagacaatatataaataatttaccccggtttctccg

SEQ ID NO: 3673 - DNA, 432 bp, Lilium asiatic
ctcccacctaaaagaaccgtcagtataaatcccttgcttcctccctcaccaaccactacgaaccaggcgaggatctagcaacctccatcaccctccccccacaatgtctgccccggctccctccacgatccaacgcggccaggtcgatctcgtcgatttcgttgactggagatgcgtcgagtgcctcaatcagaactccgcccaccccctcgccaacgcgctgaagcagggttacagagaggatgaggggctggagctcgtgagcgatgcggatgagcagcttttgatttacatccctttcatgcaggtggtaaagctgcattcaattctggtcactgggcccgaagaggaaggtccgaggacggtgaaactttttgcaaacaaggagcacatgggcttcaacaatggtaatgattacccacctagcgactc

SEQ ID NO: 3674 - DNA, 460 bp, Lilium asiatic
cccacgcgtccgagtatgtcaacacgtaccgccggacgttcactaacaagaaaggaaaggagtgcagcaaggcgcctaagattcagaggttggtaactcccttgactctgcagaggaaacgttcaagaattgctgagaagaagaagaggagcgcgaaggcgaagtctgaagcagtggagtaccagaaactcctcgctagcaggcttaaggagcagcgtgaccgcaggagtgagagcttggcgaagaagagatccaggctttctgctgccgcatccaagccgtctgttgtggctgcataggcatgtccctgtctaccaaattggctttgcagatctgttatttgaggtactttcgacggctgcatgatttttcccccaaactcattggtaattggtactttggatccgggtcctagatatgattttgtaggcatgatatactgaagtttggaacatgtttt

SEQ ID NO: 3675 - DNA, 279 bp, Lilium asiatic
gtgaaggagagattatggacttgatgaaagttgcagatcctgatgctgtttattctgtccgtagttgcatcagaaaggaacttgctttacgactgaaagaagagctcgtctcaactgttaaaaataacagaagctctgagccttacaatttcaaccatcatgatatggcccgacgttcattgaaaaacacggctctaacgtatcttgcgtcattggatgacccggagctcatgagtattgtgttacacgagtacaacacagcaacaaacatgactgatc

SEQ ID NO: 3676 - DNA, 391 bp, Lilium asiatic
tcccaatctcagttctcgatggcgcccaaggccgagaagaagcccgccgccaagaagccgtcggcgacgccgtccccagaggaggagaaggaggcggtgcccccaccggcggagaagaagccggcagagaagaagcccaaggccggcaagaagctgccggcctccaaggagggggatgcgaagaagaagaagaaggcgaagaagtcgatcgagacatacaagatctacatcttcaaggttctcaagcaggtccaccctgacattggaatctccagcaaggccatggggatcatgaacagctttatcaatgacatctttgagaagctcgcccaggagtccgctcgcctcgcccgctacaataagaagcccaccatcaccttccgtgagattc

SEQ ID NO: 3677 - DNA, 319 bp, Lilium asiatic
acgtaccaatctcagttctcgatggctcccaaggctctaaagttgccttccgtcaataagacgtcggcgactgggcccccagatgacgacaacgaggctgtgcccacaccggcggagaagattccgtttgagaataaccccaaggtcggtatgaagctgccagacttctttgagggggatgcgactaacaatattaatgccaagaagtcgatcgaaacatactatatctacattttaaacgttctcatgcactttcagactgacattggaatctataccattgtcatgggcatcatttactgctttatcaatgacatcc

SEQ ID NO: 3678 - DNA, 328 bp, Lilium asiatic
aagttctatcttaaaagtaatactattatgaatatggagaaactaacagagagagtaagaaaagagttaattccaaacataccctgcccaagaagaccactaaactcccaaagtcaatcccaatcaacacatgaatttcattccgctcccaaattacgaaaagcctgtagtccccctctacttagcccctttaagtaattcatcagctaaccccaacatgaaaccttagagggcaactcattggctgataaagcaggcccccccccccctccctccccatattacccatcacaccagacttacgttatgggtagattgtgtgtcgcag

SEQ ID NO: 3679 - DNA, 421 bp, Lilium asiatic
  modified_base (327)..(327): a, c, g, t, unknown, or other
cggacgcgtgggctttcctggcggcgatcttggcatcctcatcgtgcgaatcactcggttgagtctcaagatgacgaccaccaaaattatcggagcggtggcggcatcatttgttatcgcatatgcatgtgactacgtagtctctgtcaaaaagatttttggtggtaccaccccccacactgtcgctgacaaggagtggtgggaagcgactgataagaagtttcaggcgtggcctcgtactgctggaccaccagtcgtcatgaaccctatcagccgccagaacttcattgtcaagccatctgaatcctaaagatagacatgtccggngagttcatattttgctggtgataagaaagtctgatatggcggtttttgtttaagacttttaaatgtagtttctggatttccccttgttcaacaa

SEQ ID NO: 3680 - DNA, 456 bp, Lilium asiatic
gtcccagaacataccctatcagtgtgacattgaacaacataatacagaaaaattttcccgaggaatacacggagaggaaatctgagcaagagagttttacactcctaagtgtggatatgatacctcttttcgtcatggatgtggtgcttccgtgtcaaaaattgtcgctgaatatatttgaacctcgctataggctgatggtaagaagggtaatggaaggaaatcgtcggatgggaatggttggtatagattccgcaacaggttctgtttctgattatgcttgtgaagtggagattcttgagtgtgaaccactttctgatggacgattttatttggaggttgaaggtcgtcgtaggtttcgtattcttcgatcttgggatcaggatgggtatcgggttgcagaagttcaatggattcaggatttgcacccaccagaagggtcacaagagagagatg

SEQ ID NO: 3681 - DNA, 405 bp, Lilium asiatic
gaccaagctcgcggtgcgccgccacacggcattatcctcgcggtggtcgtctgcgtagtagtcgccgtcccttaccttatcggcgacgggggcgaggccctcaccacggccttcgcggatctcctcagccctgctggtctcctcctcctccctgtgggactcatcctcctcatccgcttcctctcctccgatcgcggctctgccttctccggcctcttctccgccggttcgccggattccatccaccgcgtcggtgggtctccggtgggtgtcgcgctggtgctactgctgcttgtgtttctcctgtataatcgagtgtcgcttttcggcagcgacggcggcggcgacgactaggtgatgagatctgtgtggtcggagggtatttctgtcatttggtagcgtggt

SEQ ID NO: 3682 - DNA, 451 bp, Lilium asiatic
cccacgcgtccgctctgaaaccctagaaaccctaacagccgatcccaaacccagcagcagcggaagagatgtcggccccagggatggacgaagacaagaagccggcgcccgatcagggcgctcacatcaatctcaaggtcaagggccaggatggcaatgaggtcttcttcaggatcaagcgtagcactcagctcaagaagctgatgaatgcatactgtgatcgccagtcggtcgacttcaattctattgcctttctttttgatggccgcaggcttcgcggagagcagacccctgatgaattggaaatggaggaaggagatgaaatcgatgctatgctccaccaaaccggtggtgtgaagaatgaagcatgatcagataatttagctacctgggagatttaaatgaccgcgaatgttttccatggtagctctgggtagccttggtatctaat

SEQ ID NO: 3683 - DNA, 368 bp, Lilium asiatic
tgccgtgatgtgaacacgcggcgctcgctcgggtatgcgtatgtgaatttcagcaacccaaatgatgctacaagggcattggatgtcctgaactttagcccgcttaatgggaggcctattcggattatgttttcaaatcgtgatcctagtattcgtagaagtggggcagctaatatctttattaagaatttggacaagagcattgacaataaaggcctgcatgagacatttgttcaatatggaactattctctcttgtaaggttgccactgatccaaatggtcagtcaaagggttatggctttgtccagtttgagaaagaggaggcagcattaaaagcaatccaggagttgaatggcatgcttttgaa

SEQ ID NO: 3684 - DNA, 453 bp, Lilium asiatic
tcgccacgcgttcgctctgatgcagcagagggcgatgatgaatggaggctacgacggtggatacgcacagatggggtatccgagaccgtcaccaccgccgcagcagccgatgcgaccacaaggtgagccgatggggaattacttcagtgacgagaacccgaatggatgctcagtaatgtgagtgaagaagtggtagagatgatgggtgcttaatggtgttgagttatacggttatttttaatttcatttctaagtttttgttacttttttaagtacgatgaatatctagtatagagttatattagttatcttgtagcacaaaggtgtgagtggtggctggaggggtataagaggtttgggggacagagcttttattgagactttatttgagatggtgaagtgtcaatatattgttataaagtggaaatgattattaagtggtggtttgggggc

SEQ ID NO: 3685 - DNA, 149 bp, Lilium asiatic
tgatgcgatcactacgtctatcctaagtggaattactttagtgacgagaaccctaatggatgcttagtagtgtgagtgaagaactggtatagatgatgggtgcttaatggcgttgagttatacgggtatcattaattctatttctaagt

SEQ ID NO: 3686 - DNA, 404 bp, Lilium asiatic
gtttgagttgttgagaaactgcgctgggcattaccgacggctagaggaggagattgagttcaacttgggggaggaggtgggggtgagggagaatggggagatgtttgagttgaagatggctttgcagctcgggaggagcattgaggagatgaaggaattctcatcgtgcagagatgatgcagatgttaaagaatttgctgggaagctcttctgattttattcgatcgatctagcaaaatatatgttcataggatctaggtggagatctagcctgatgtattcttagcaaggagtgaatctttgtatataatttgagagtaatgaattaatatttaagttcaacagacttatgttgagtgttagtatgaataatgtatttttatattttcagatctggcattttc

SEQ ID NO: 3687 - DNA, 213 bp, Lilium asiatic
gggtagttactttcattttcattatcctggagtgtagcaatgacagctagtatgaataatggagaccagtatcccaccctgactaagacaaaaccgtaagaacgtgtattttgtctactgaaggcctgaggtgccgttttcttttctgtatatttgatatttgaagcatgcattcctactgacgagctttaacacaagcggcttgtgttcaac

SEQ ID NO: 3688 - DNA, 434 bp, Lilium asiatic
actgcttcaggataacgaggaaagaagcttaaaatcatgtatgtgtagcagggcttcccttttacgtgtaagggatattgaatcccggtcttgctaatactggaatactgtgtgacatcgatcttttgagatgtcaaaggcgatttggcccccattttatttttctcactcagcatggggattttgtataaaatgacagtaagttaattagtcacctcacgataaatatggttgacaatccagatccttagcggcatagcgaagatcaacatcagccatgcgagttaaattatgttacaaacacgatgatcagtcgaaggagccatgcgagttagatgtattaaacttagtttggtagattcaaaaggttttgataagctgtgctacatttattaaatctgaattggggctattcaaaacataatttgtcactt

SEQ ID NO: 3689 - DNA, 363 bp, Lilium asiatic
cccacgcgtccgcggacgcgtgggctagattagaacagtacaagaattatgagaacattgcaaattctggagaagcatcagaaaaggaatgcaaactgactaagaaaggggcaatgttttacgaattctggcgcaacacaagatctgtgagatcaactattctacattttcagcttagaaacttagtctgggctacatcaaagcacaatgtatacctcatgtcgcactataccattattcattggtctgtattgagctgccagaagtcagaagtattgaatggtttgggacatgtagcttcgtctgagaagcacccgggaaggttactagagggattttctcaaactcaagttagtacattag

SEQ ID NO: 3690 - DNA, 433 bp, Lilium asiatic
ggcatcgctctctttagcacggattcctccagaaattgttggcgaaccaatagaagctaagtggttgtatgaggctgtgaacgtgatcctctccttaatgaacagcgatggtggttttgcaacttacgaactaactagatcttatgcatggttggagcttatcaatcctgctgaaacttttggggacattgttattgattatccatatgttgaatgcacttcagcagctattcaggcattggcatcatttaagaagttacatcctggacatcgcaaagaagagatagaaacttgcatcagaaaagctgcttctttcattgagagcatacaaaagcctgatggttcctggtatggatcttgggctgtatgcttcacctacggcatatggtttggggtcaaggggactgctactgccgggagaacctatcagagt

SEQ ID NO: 3691 - DNA, 409 bp, Lilium asiatic
ggaagaggctgttcaagatgttcctgcgccgcatcctatcagccggtaccggccacgccctgttggcacgcgtcaaggagacgacggggatcgtcggcctcgacgtcgtgccgaacgcccgcgaggtgctcatctcgctctacaccaagacgctcaaggagatccaggccgtgccggagggagagtcgtaccggaaggccgtcgagagtttcacccgccaccggctccaggtctgcaaggaggagggggactgggagatgatcgagaagcggatcgcctgcggccaggtggaggagttgatcgaggaggcgcaggatgagctcaagctcattgggaagatgatcgagtgggatccatggggtgttccagatgactatgaatgcgaggtcgttgaagacaattcggagat

SEQ ID NO: 3692 - DNA, 342 bp, Lilium asiatic
ggcagaacaggccgatcccgcactggatccgcatgaggaccgacaacaccatcaggtacaacgcaaagcgcaggcactggcgccgcaccaagctcgggttttgaggtcccatcgaattgcttcgcttctccgttatgtctttgggctagggtttatgttcttttgttgttactgagaggatgcaaaagtgaattttgttttgttaattaacgactaggtggtttcgtattatgagtatgcctttgttttgagaagtggttttagttataatggattgctggtatggttttagttgaattactgtgatatttcttttatgcgcttcatatatttttgataagt

SEQ ID NO: 3693 - DNA, 359 bp, Lilium asiatic
gagaggtccagcgagagatctgagctcgatcgcccgaagatgagggcgaagtggaagaagaagaggatgaggaggctgaagaggaagcgccgaaagatgaggcagcgatccaagtagatcctgatgcagcggccttcatcatgtggaagatagtcgatggtcttacatcttgccggtctttcatcttgctgttggtttctctgttgatgtctagcatctaaatttcctgttttgcagctttagtaggttctaagactttaaatgttatgcttttgttgacaatgtgtgagacaatggtgttgaaccatatttgatctcttttgagatgtttaatgttgaagcgtagttatttctagatt

SEQ ID NO: 3694 - DNA, 409 bp, Lilium asiatic
gaagtaatggagtccggaaagatagccaagggcgctgccggccgcaagggcggagcaaagaagaagtccgtcccaaaatccatcaaggctggcctccagttccctgtcggccgcattacccgttttttgaagaagggccgctatgctaagcgcgttggctctggagctcctgtctaccttgctgccgtccttgagtaccttgctgccgaggtgctggagctggcgggcaatgctgccaaggacaacaagaagtcccgaatcatcccgaggcacatctgccttgctgtcaggaacgatcaggagcttggcaagctgctcgccggagttaccatctcccacggtggtgtgatccccaacatcaatccggtcctgctccctaagaaggctgctgagaaggctgattctgctg

SEQ ID NO: 3695 - DNA, 224 bp, Lilium asiatic
gggagagatgatctgacttttggtggttggatcttttctagtatattttgtagcgctgcatttaggagttatttggtggtactcttgtgtgttggaaaacctagttctggtttatgtgtctggtcctgttttctattatatgctgttggatttgtcataaaagatattgttagagaattttataactctgcaattgaatttcgtgatgcgtgtgttgggacctg

SEQ ID NO: 3696 - DNA, 418 bp, Lilium asiatic
  modified_base (358)..(358): a, c, g, t, unknown, or other
cctcttcaagctggtgctgatcggcgactcgggggtagggaagtcgaacctgctgtcgaggttcacgaggaacgagttcagcctcgagtcgaagtctacgatcggggttgagtttgcgacgcggactctttctgttgacgggaaggtgatcaaggctcagatctgggataccgctgggcaggaacggtaccgagccatcacaagtgcttactaccgaggagccgtcggcgcattactagtgtacgacgtcactcgccattctacattcgagaacgtcgagcgatggctgaaggagctaagggtacacactgatccaaatatagtcgtcatgcttatcgggaacaagtccgatcttcgncaccttgtcgcaggttcaactgaggatgcgaaaacctttgctgagagggaatcactctac

SEQ ID NO: 3697 - DNA, 413 bp, Lilium asiatic
  modified_base (369)..(369): a, c, g, t, unknown, or other
  modified_base (402)..(402): a, c, g, t, unknown, or other
gattgaagcttttatgtgaagcaaaattatgcgaagaactcaccttcgacactgtagcatcaacattggccttggcagaacaacatcaatgtgattgtttgaagtccatgtgtctaaaattcacagcagctcgagagaatttggcagttgtgatgcagactgaagggttcgagtatattgagcagacgtgcccatcactgttatctgacctgttagcgactgttgctgtggcgaatgaggagtcaaccccaatttaccgcaagaggagcagcagcaatgtaggcctgaagctgttggatggcgctgacgctaatgggaggcgtgtgcggaagaggatgtagttacaattggttgtaatctcaggctcangctctagtctagtgttttcatgaatgcactcanactgtatcatc

SEQ ID NO: 3698 - DNA, 390 bp, Lilium asiatic
ggagtccagcactgaccatatctaaggtactgttgtcaatctgctcgctcctgactgatcctaatccggatgacccgttggtacctgagattgcccacatgtacaagacagacagagccaagtatgaggcaaccgctcgttcctggacacagaagtatgctatgggttaatgttttttaggtgttaatgtgggcactatatgctaccctttatcagttaataaggatagattgttattgtgtggatcagttaacatttgaatttgttcaatggttatggttatgcttcttgtgaaaaaaaaaaataaaacaaaagtaattgaacaaaataaaggtaacattggtaccattgccccgatcgtcaatggttcatcgttggttctaacattct

SEQ ID NO: 3699 - DNA, 62 bp, Lilium asiatic
cctcaaatcaggctatgttggtacatatttttttttggcacaatcaggtacattttttgctc

SEQ ID NO: 3700 - DNA, 420 bp, Lilium asiatic
cggacgcgtgggcgggcatgccttcgccctcttcgtcgctgtctccgtcggtgccaacatctccggcggccacgtcaaccccgccgtcaccttcggtgccttccttggcggcaacatcaccctcatccgtggcgtcctctactggatcgcccagctcctcggctccacagtcgcctgcttgctcctccgctacaccaccggcctccccaccggtaccttcgcccttgttgagggagtcagcgtctggaacggcctggtacttgaaatcgtcatgactttcggactggtctacacagtctacgccaccgctattgacccgaagaagggtaacattggtaccattgccccgatcgccattggtttcatcgtcggcgctaacattcttgtcggtggggctttcagcggtgcctcgatgaaccc

SEQ ID NO: 3701 - DNA, 290 bp, Lilium asiatic
attggctttccaacaatatcgctaacaaggcatagatgctgctagaatggattggttcctactcatagtgatatcggaggtcctcttttaaaatttctcggagctatttctagtagccaatttgattatatttatttacctttgcggaccctagcattttgttatgatttggttggtgctcggtgttgaccttgtacctctaattgcttttcccgaaaatgttgttcgagtgtgtttatataacatatttaatttgaagcttctaattaaaaaccatagatattttgtgt

SEQ ID NO: 3702 - DNA, 290 bp, Lilium asiatic
gaggaggtggcgggtatggcggtggccggcgtgatggaggtggtggcggtggctacagcagccgtagcggcggtggttcgtctgacggcaactggaggagctgatcatgttgctggtatctttttcttaggtcttgagctgttggtttgaacttgtcttgctttgttaaattagttgtggtctgctgctgagtatagtctcgttacgtctcgaacgagaacttggaagaaaaaaaaaataaataaaaaaaaaatagaaaattaaaataaaaataactttaatattgatat

SEQ ID NO: 3703 - DNA, 291 bp, Lilium asiatic
cccgatgtgcgtggacacagcccatccagccgatagcgataatgtgctcagatattattgtgggagctagggaaactgtattacggagatgggcaatataaacctataggtacatggtaagtattatactcgtctgaattataatattgatgcattcgctatgcattatgacctagcttgaatcatataccgacacatgcatgatttgaactgttcttttacctcaattattcaacaagtgcatctttttcacactttacgtactagtgctgttattctaatttgcttatt

SEQ ID NO: 3704 - DNA, 423 bp, Lilium asiatic
aaaccctctccgccgcatcagcaaatcgctatggcgctacccggccagcagaccgtcgagtaccccaacttcaaacttgtcctcgtcggtgatggcggcacagggaagacgacattcgtcaaacgtcatctgactggtgaattcgagaagaaatatgaaccaactattggtgttgaggtgcatcctctggatttcttcaccaattgcgggaagatcaggttctactgctgggacactgctggtcaggagaagtttggtgggctgcgcgatggctattacatccatggtcagtgtgcaatcatcatgtttgatgttactgcacgccttacctacaagaatgttcctacttggcatagagatctttgccgagtatgtgagaacattccgattgtgctttgtggcaacaaagttgatgtgaagaac

SEQ ID NO: 3705 - DNA, 458 bp, Lilium asiatic
attcgactccgctcaaatggcgaggatcaaggtccatgagctccgcggcaagtcgaaggcggatctgctgacccagctcaatgagctcaaggcggagctcgccctcctccgcgtcgccaaggtcaccggtggcgcccctaacaagctatccaagatcaaagtcgttcgactgtcgatcgcgcaggtactgacagtgatctcgcagaagcagaaggccgcgctgcgtgaggtctacaagaagaagaagtatctcccgttggatctcaggccgaagaagacccgggctatccgtcgtcggctcaccaagcaccaggaatctttgaagactgaacgggagaaggaaaaagagatgtattttccaatgaggaagtatgccatcaaggcctagaatatatgactcctaagatttttcttgcatgtttggatttaatgcatgacactgtgctgtgctagaattg

SEQ ID NO: 3706 - DNA, 454 bp, Lilium asiatic
cggacgcgtggggaaaaaacttcaaaagctagggtccttgttgaacaacctttgtactctgaattgaaagacaagatggacgaacttaatcacgacattcaacagggaattgaagatgttgtagattcgactgatctgaaggataaattagaggtgttgaaattggaggtggcaatggcaggtaaatctcctgatactgagaccaagaataaaatcaatgcactgaagcaggaggtcaagcaaagtcttgcggaggctatgagctcaccattgttgattgagaagtacgagaaactgaaacaagaaatttcaagagttactgcatcttcctctgatgatctggagggaggttattctggagacctgaatggaggtctaaaacgggatgccgagaaagaggacagtccaaaacttgatacctcaaaagttgggttcaacatcggctttaatagct

SEQ ID NO: 3707 - DNA, 474 bp, Lilium asiatic
  modified_base (396)..(396): a, c, g, t, unknown, or other
  modified_base (454)..(454): a, c, g, t, unknown, or other
ctccgtctgcgttgtcactcagaagaaggtcccggacaagttactggatcagaccagcgtcaggcatctgtttccaatcacgaagtatcttggcctgctggctacggggatgacggctgacgcgaggtctctggttcatcaagcaaggaatgaagctgccgagtttcgtttcaaatggggatatgagatgcccggtgacgtattggccaaatggatagccgacaaagcacagttatatacccagcatgcctatatgagacctcttggagtagctaccatgatcttgggtattgatgaagagaatggacctcaacttttcaaatgtgacccggctggtcatttttttggtcacaaggccacaagtgctggttctaaagagcaggaagcgattaactntttggagaagaaaatgaagaacgatcctgcattcacatatcaggagactgtgcagacngctatatctgctttgcaatc

SEQ ID NO: 3708 - DNA, 296 bp, Lilium asiatic
cccacgcgtccggtgaagcctggtatggtagtgacttttgggcctactggtctgaccactgaagttaagtctgttgagatgcaccatgaggctctccttgaagccctccctggtgacaatgtgggatttaatgtgaagaatgttgctgttaaggatcttaagcgtgggtttgttgcctcaaactccaaggatgaccctgccaaggaggcggtcaacttcactttccaggttatcatcatgtaccaccctggccagattggtaatggttatgctcctgtcctggattgccatacctg

SEQ ID NO: 3709 - DNA, 445 bp, Lilium asiatic
cccacgcgtccgcggacgcgtgggtctgactctacaagatcaggagagcaagatgatgaaatggatcctgacgactagagtctagtctgcaagtgaaattggtttgccctgtgtctgtcgaaggacctgaactaaagattgtgtcggcttgcaaaggcagaggtcgatcactcggaatgtgtgaacacagcagaggtcgattttttcttctcctttttctggatgtcaacatagtatcgtggggcgattccgagctttggctagtcggtatagatcccagaaaaggaaagtaaccccatcaatttttcgggcagagctctgtatatttcagtgtgtattttactgatcagatgttttatcttgttctaggaaggtattccagattgtattactttggagacagagggtttgtgtttgttttatatctgctaagttttggactgcc

SEQ ID NO: 3710 - DNA, 467 bp, Lilium asiatic
  modified_base (383)..(383): a, c, g, t, unknown, or other
  modified_base (424)..(425): a, c, g, t, unknown, or other
cacgtttcggatttgataaagaagcaaggcgtcggcttttcaacatgatcaacaacctccccacaatattcgaggtcgtgactggggctactaagaagccatcaaaagaaaagacccctaacggcagcagcaaaagcagcaagagctcaaagccagcagcacgactatcagtgtcagagtcgcagaccaaggttccgaagatgcccccaccgcccaaggatgatgaggacagcgaaggtgaagaagaggaagacgaggaggaacatgggaacactctgtgcggtgcctgtggggataattatgcggcagatgaattctggatatgctgtgatgtgtgcgagaaatggttccacggtgggtgtgtgaagatcactccagccagngccgagcacatcaagcagtataaatgcccagcttgcagcanntagagggcaagggcatgatctcaaaatagctgtgttagtcat

SEQ ID NO: 3711 - DNA, 395 bp, Lilium asiatic
cggcctccaaggagggggagaagaagaagaagtaggtcgaagaagtcggtcgagacctacaagatctacatcttcaaggtgctgaagcaggtccaccccgacatcgggatctccagcaaggccatggggatcatgaacagcttcatcaacgacctcttcgagaagatggctcaggagtctgttcgtctcgcccgctacaacaagaagaataccatcacctcccgggagatccagacctccgtccgccttgtcctccccggcgagctcgctaagcatgcagtctctgagggcaccaaggccgtcaccaagttcaccagtgcttaaggtgtgtttgtactatgtagctgtcaacttttgctgcttacaacatttctcgttgttggttggttggtttt

SEQ ID NO: 3712 - DNA, 428 bp, Lilium asiatic
  modified_base (425)..(425): a, c, g, t, unknown, or other
cccacgcgtccgggcatggtgtgcgtcaaaggggaatattccgtattttgagacatctgctaaagagggaattaacgttgaagctgctttccagtgtatagctatgaatgctctcaagaatgaaccagaagaagaaatataccttccggatactgttgatgtgtcgggtgggcggccacagagatcctctggttgtgaatgctaaatggatgcactatacacctgcagtttgggcagcgatttggtatgcagtagcactttgtatcttatatcccaaaatttattcgttctagctgtctggtgggatatacttcaagtagctttttaccctcaaactaattcatttgtgccaggataatgaattgttgtgcagttcttgcggttaactttttataatcgggtacttgcccttactggtgaattcngtg

SEQ ID NO: 3713 - DNA, 278 bp, Lilium asiatic
tcgggcaccgttgtcaccgggtaaccatgtatagctaatagctcttttaccttatatgatagaatgaaaataaagcaagaaaatcaagaatgagactgaggaagtaaggatcttttacctgaaggagggaggtggtaggattgttggtttgttcctaagagctcgactgacaggcggtgatgcctgtgagctgcaaggtggtggtagagtaggtggttctctctgtaattttgtagtatcagagattcagaaggcttcttgtttgagtttcctttacc

SEQ ID NO: 3714 - DNA, 411 bp, Lilium asiatic
  modified_base (388)..(388): a, c, g, t, unknown, or other
ggatccaagctccccattttctccacggggcggaaggaccaaaccctagccgtcctcgccgtcagtcttctcgccgtgctgccgccgtccggattgttcgatcggattctctcctcacctctgccaggtcttctctaattttctccccggaccggaaggaccaaaccctagccgtccttgccgtcagtcccctcgccgccgctggattctttcctcgcctccaccagactgtcgaaggatcagagatgccgttagggttgattactgggctagcaagggcaatgcggaggaagcgtacttcctctttgattatattgtcctcaaaaagagccccccgtaattattacaagggaaagaactgcaaaccgactggtttccacactcgcanaggtggctatgttctcgtggatg

SEQ ID NO: 3715 - DNA, 417 bp, Lilium asiatic
cccacgcgtccgcggacgcgtggggtcaccatcaaagatcatcttctactgtctggaaagagcgccagagggcggacagacatcagttataccgagcgatgtgatagttgagaagatggtggagaggctaccacacatggtggagaaactccaacgtgagggcatgcttaccatcttccacactaccgcctggcagcgcatgcttaaaaccgacgatccaacagtggctgagaaaagggcactggagtctctagcatgtaattcagtcaagttcaacgaggatggatctgcagatatcattcacggcccgatgaacccggtaagagagatcaatggaaagagggtgtggttcaactcaatgctcggatactccaccattgaacgggaggcctggatccggtacggtgatgggagtcc

SEQ ID NO: 3716 - DNA, 419 bp, Lilium asiatic
cccacgcgtccgcccacgcgtccggttctaggccggaggttccaatgcgagctggatcgcgtcctcgacaatgtcaaggagagccttgaagccttcgacagcctctggaacgaggtctacgacacgacggacgtgaatcagaaggaggagttcgagccggatttgatggaggagatcgaaaagctgctgctgtaccgcgatcagatcaaggcatggatcgagtcggacgtgataaagaacaatgatctattcggttatagggacattgcatattatcagcaagctctcatggactctctgaatctcattgagcgggaaatggaaagatttgaagtctgtgaaaatgagggctaaacaagaactttctccaaagaaggatcacgacccaaagctggtcttcactccctctgatcggcctt

SEQ ID NO: 3717 - DNA, 462 bp, Lilium asiatic
cccacgcgtccgcggacgcgtgggatcaggatcaccaccgcctccgggacgtatcacctctccgatctagggtttcgctgacatggcggcgccgaccaactcatctctcaaggtggaacatgaatcagaagattcaacacaaagcactgcagatatgacagcatttgtgcaaaaccttctcgtccagatgcaaaccaggttccaggcgatgtccgagaatattgtttcaaagatagatgaaatgggaggacggatcgatgagctggagcagagcatcaatgacctcaaaactgagatgggagcggatgggctaccgaaatcggtaactgaaggaagcaagcctaaggattctaaggatgaatcgtcttaaatcgcatgcaagtttcttgccagttggtatgtctggatgactttcgtgtcagtaaatctattctctgagtttgtgttgtaatcattctatta

SEQ ID NO: 3718 - DNA, 466 bp, Lilium asiatic
  modified_base (239)..(239): a, c, g, t, unknown, or other
  modified_base (263)..(263): a, c, g, t, unknown, or other
gcttgagatcatggagccatgttgcagcgttaaagataggataggctacagtatgatcactgatgctgaagagagaggtgttataacccctggaaagagtgtgctggtggaaccaacaagtggaaacacaggcattggtcttgcctttattgctgctgccaaaggatataaactcatcttaacgatgcctgcatcgatgagtactgaaaggcgagtccttctgaaagcttttggagcanagcttgttcttacagattctgcanagggcatgaagggagcagttcaaaaaggccgaagagattttaaagaagacacccaatgcctacatgcttcagcaatttgataaccctgcaaacccaaagtacactttgagactactggaccagaaatctgggaagatactagagggaaggttgatatatttatcgcaggaattggaactggtggtaccatctctggtgtgggc

SEQ ID NO: 3719 - DNA, 433 bp, Lilium asiatic
ggtggaactctcaaagaatctggatttacaagaggattacttcctacttttatgccaccgttgacaccgtcttcagccttatagggctgtcccaaatggcattcgttataacgacaaaagtcactgatggtgatgtctcaaagagatatgagcaagaagtcatggagttcggagaatcatcttcgatgttcaccattattgccacctatgcgctgctcaaccttgtgtgcttggtgggaggactgaaaagggtaatggtcgatgaggtggtcgatagcttcgagtcatttttgttgcagttaattctctccggggttgtggtgcttatcaatgaacctgtctacgaagccatgttcctgaggaaggacaaaggcaacatacctacttctatcatattttcctcctctctacttggtataattgcatgtttggt

SEQ ID NO: 3720 - DNA, 279 bp, Lilium asiatic
catcacctctcgggagattcagacttccgtccgcctcgtcctccccggcgagctcgccaagcacgccgtttctgagggcaccaaggcggtcaccaagttcaccagcgcttagggtctctactgtctacctctttgtgttcagacttgttattgtattggtcggatgttttcgtgaatgtggaaccaaagcctctttggtttgctctgctgttcaatctcaaatgctctttcttttaatcctctgcttccaaattaaaaaaaaaaaatttatatttatat

SEQ ID NO: 3721 - DNA, 325 bp, Lilium asiatic
cggacgcgtgggatccggacatcggaatctccagcaaggccatggggatcatgaacagcttcatcaatgatctcttcgagaagatggcacaggagtccgcccgcctcgcccgctacaacaagaagaacaccatcacctcccgggagattcagacctccgtccgcctcgtcctccctggtgagctcgccaagcatgctgtctctgaggggaccaaggctgtcaccaagtttaccagcgcttaagctttggggtgtttctactgttctagggttctcatctggcatgtatttctttttttctatctcgaaaaaaagaagcttgttct

SEQ ID NO: 3722 - DNA, 376 bp, Lilium asiatic
aacaccggatccaaaagcgcaaagcctgatgcctcagccaaagcaactgaagcgaagatagtgagttccggcaacaacaccggatccaaaaacaccaaagcaactgaagcgaagacatcaagctctggcaacatcgacaccggatccaaaaacacaaaagcggatgccttagccaaggcaccagcgaagacatcaagctctggcaacgacgacaccggatctgaaagcacaaaggccgatgcctcagtcaaggcacctgaagcgaagacatcaagctctggcaacgacgacaccggatctgaaagcacaaaggccgatgcctcagtcaaggcacctgaagcgaagacatcaagctctgacaacgacgacaccggat

SEQ ID NO: 3723 - DNA, 429 bp, Lilium asiatic
gcacagaccctgctagaaatacacaatactcatcactatttggggttcttcggctcaatacgaaaagcaattaagggtggcagcttcgactcgtttcgccagagatttatggacgatcgacgtgcccatctcatatctgccatggcatgctcgtgaaaggtctgatctcaaataccagattgctggtgttactggaccaaagaacctgttgaattacatgttttgatatacatgcacgggccattgcaacgaggggtatatgtgagacgacacggtgtccagagaagagtaggcaacggtcggtcaataagacgcagtactgcatttcttaacctctggtggtctgcatttctcgacctcaatgtcattcattgcaagacgaacatcaccaccggatcccagtcatcctttcatttgcccatatactct

SEQ ID NO: 3724 - DNA, 453 bp, Lilium asiatic
cggcggagcgggtcgggacggcggtgaggagccgctgggcggtcatccagcagacgcggcagcgccgggacctgccgccgcctggcgagaccgtgcaggagcggatcctgtcggcggcggcctcgacgggtttgctgctgaagaaggggatcacggagacgaaggagaaggttgttgtggggaagatgaaggtagaggaggctgcgaagaagactgctgataagagcaaggggattttgaacaatatcgagcggtggcagaagggagtggcgagcagtgatgtgtttggtgtcccgatcgaactaactgtacaacggcaacacactttcaggcctattcctcaaatattagtcaaatgcgcagataatctcataatatcaggattacatgatgaatacttgttcaaatcggatggggataaaaaagctatgcggcaattgatttcactttaca

SEQ ID NO: 3725 - DNA, 331 bp, Lilium asiatic
aaaaaaaaaaaaaaaaaaaaaaaaaaaaaaaaaaaaaaaaaaaaaaaaaaaaaaaaaaaaaaaaaaaaaaaaaaaaaaaaaaaaaaaaaaaaaaaaaaaaaaaaaaaaaaaaaaaaaaaaaaaaaaaaaaaaaaaaaaaggggcgccctttttaaagaatccaagtttacttccccttccttccaacttcataccttttttatagggtcccctaaataaatttaattgccctgcttttaaaaacttcttaactggaaaaaccctggctttcccaatttaaatccctttgaaaaaaatccccttttcccaatttggcttaataccaaaaagc

SEQ ID NO: 3726 - DNA, 424 bp, Lilium asiatic
atcgacatttgaagacttgaatctgtcgaaggagttgatacaggggttgtatgtggagatgagatttaagagtcctagcaagatacaggctgtaacactgccgatgattctcactccaccgtacaaggacttggtcgcacaggcccataatggctctgggaagaccacgtgtttcgttctcggtatgctgagccgggtggatcctagtaagaagataccacaggcaatatgtatatgcccaactagagagctggctcagcagaatcttgaagttctgaagaagatggggaaatttactggcataactgcagtgtgcgcaataccttcagactctgctcattatacccctgttaagagaatgcctcctgttactgatcacgtggtgattggcacccccggaactgttaaaaggtgatgtctgaga

SEQ ID NO: 3727 - DNA, 193 bp, Lilium asiatic
aaaaaaaaaaaaaaaaaaaaaaaaaaaaataaaaaaaaaaaaaggacaaaaaatataaagggggacaagctgaagtacgcatgcgttcaacggtcatacatctactatagtgtaaccaaaaattcatttcaatggccgaagttttacaacgattttgactgggtaaaccctgtcttaaacccaacttatttcg

SEQ ID NO: 3728 - DNA, 61 bp, Lilium asiatic
aaaaaaaaaaaaaaaaaaaaaaaaaaaaataaaaaaaaaaaaaaaaaaaaaaaaagacaaa

SEQ ID NO: 3729 - DNA, 381 bp, Lilium asiatic
cccacgcgtccgcatcaactcagagcatatctgatgaatgtggcgtgtatccaatctcctcaaaacgtagtgatttaacggtggcatcaagttctacagaggcttcatcctccttagcaagtaatgcactgaccctttctgattcttcattcccagtcaagactaccatggatgagcaagatatgattgacctcatgagcctcactttgtcatcaaactcaacaccacatctaacacctcctgcaccacagccctctatattgaatatgaatggacctccagtcgcggtctcccctaacggacattggtacactaaccctcattcgtacataccaaaccaagggtacaattcctataacaggtatgttgctccctgggctc

SEQ ID NO: 3730 - DNA, 443 bp, Lilium asiatic
  modified_base (358)..(358): a, c, g, t, unknown, or other
ccctacgtcacttttgggtatcccaacttgaagagtgtcagggagttgatctataagagaggttttggcaagcttgataagcaaaggattcctttcactgacaactctgtaattgagcaggggctgggcaagcatggaattgtctgcattgaagatcttgttcatgagattgtgactgttgggccacacttcagggaagccaataattttctctggccgttcaagctcaaggctccattgggtggcatgaagaagaagaggaatcattatgttgagggtggtgatgctgggaaccgtgaagattacattaatgagctcattaggaggatgaactagaatttgttcctgagttctatgnctgttctgaatttagtccctaagtttaccttgattttggcaagaacagtattgagtaacattgagtttgcagttttgctaactaa

SEQ ID NO: 3731 - DNA, 322 bp, Lilium asiatic
ctctaatctagataggcgcgagactaaacgctacctcgagatgttttatgctctcaagtatcgcaacttggcgcgttctgtacccttggctgttgacggagaggctgctgtcaacggaacaaaatagtgttcgcaaccgatggaaggttcagttctatgttctcagatggaagtgtctcgctgcttttcttgttgttttatttggtgtttgagctggctttgttgcaaactgagccagaattgttggctgtttcggagtgtaatgctttgcgtaagaattggatttgggtttttcgggaataataatgcaacattttctttc

SEQ ID NO: 3732 - DNA, 450 bp, Lilium asiatic
  modified_base (414)..(414): a, c, g, t, unknown, or other
cctaaacctaacccctccaatggcccgcaccaagcagactgcccgcaagtccacaggcggcaaggctccccggaagcaacttgcaaccaaggcggcacgcaagtctgctccggccaccggcggcgtgaagaagccccaccgcttccgccccggcactgtggctctccgtgagatccgcaagtaccagaagagcaccgagcttctcatccgcaagctccccttccagcgcctcgttcgggagatcgcccaagacttcaaggccgacctccgcttccagagctcggcggtgtcggctctgcaggaggcgtcagaggcgtacctggtggggttgtttgaggacaccaacctgtgcgccattcacgcatagagggtgactatcatgccaaaggatatccagctggcgaggaggatccngtgagagagggcttgatcttgttaaaaatttcattt

SEQ ID NO: 3733 - DNA, 417 bp, Lilium asiatic
  modified_base (346)..(346): a, c, g, t, unknown, or other
  modified_base (359)..(359): a, c, g, t, unknown, or other
cggacgcgtgggttggaggccatgaagccgctttctgttaaaaaagcaaatgatgacatctttattaaattgggttccgacaagggcactggaaagaagaaagaaaatactgagcgggaaggagggaaaaagccattgagtatcaatgaatttctgaagccagctgatggcgaacggtactttggtgggcgtggccgtggaaggggccgtggtgatcgtgcaccattcagaggtggttttgctggtggagcgatgccaaactctctgcccactccatcaattgaagaccctggtcagttccccactcttggtgggaagtagagcgatagtgtgccaaactgtgctntctgtcttgtttntaaattagtctcttctaaatttagtagaggtaatgtctggattcggcacaaatacaat

SEQ ID NO: 3734 - DNA, 256 bp, Lilium asiatic
cttcggacccactattggtcttacgggggcctgtgggggccattattggttgggccgtcccttgcctaagtcctgctctctcgggaattgtctaagttctgctctctcgggtagttgaattttaaatgtatcggattttcatctcttgcctttgtggagtggttaaattgggcagggaaatgttggagcaataaacatatgttggagctttttgaatatctagactcaggtgtagtatcgtgtatgtcactaatat

SEQ ID NO: 3735 - DNA, 285 bp, Lilium asiatic
tcggattaggtcagggccagtcggaactgatgaagaggaggctgaaagtgcgttggagaagtgttttcggcccgatttgaccgaaaatgaaggtcgtctactccaattgacgagtaccaccttcaatcagttggatcactgtacatctcgcaagatgaccggaggagaggggggagaaggaggtggaatgtgaaccacacatgcttccgtccatggatcgagggatatgatcggtgacccagatggagatgttaatggcttatataagattcatttctcgattct

SEQ ID NO: 3736 - DNA, 422 bp, Lilium asiatic
  modified_base (336)..(336): a, c, g, t, unknown, or other
  modified_base (414)..(414): a, c, g, t, unknown, or other
ctgagatggggacgacgacggtggaggcgaggacatgcctgtcgcagagccacaggttcaaggggacctgtttgagggaggccaactgcgctagcgtctgccagacggagggattcaaaggaggggtttgcgagggcatccgccgccgttgcttctgcgaaaccgactgtcactgaggcctgagctctcggctttaataagtaatgtcggactatttgagaagaataagatggacctggtggtgttggttttacagtctcttcttcggtgtggggacttgaatactttcttctaggtttctgatatgtagttgtttgtgtctaggttgagctgtanggctgtgttctgtagttggatttgtggtggagtaagttctctcgtatttgattgcttattttaattgaactttattgntagatgtt

SEQ ID NO: 3737 - DNA, 425 bp, Lilium asiatic
cccacgcgtacgggagtcttctcattgcccgatggttgcagttggggacataggcctctgctggcgctaattgaaagatctgagctgcctactataacgcatatataatggaaattgaaaggcgactactcgatattagaggctgcagatgctcattttccgcatatactaatatacacgcagtgtgctaaatatctttcttgaaaactttatgctctatgctgacacttacaccgagcactctctgcggaatacggtgactgcgatggatgttgtctatgctctcaataagcagggaaggacgcttgacggtttttgcggctaagatgtcatggtcctatctgaaggattttgattttcaatatgtgcttaattgttcttgttttatctaggttttttgttttagactgtattctgttatcttt

SEQ ID NO: 3738 - DNA, 359 bp, Lilium asiatic
cggacgcgtgggcaaacctactagttcacattcttatagagtagacatatgaagacttacggtgggttcttccggctttccaatcatcctagagttaccgattctttatatttgtggaatgcaaacaagtacagatgatacatcgcttgctcggcaaaacaaatagaggagtccaacgtgtcagccggaagcttataacagcttggtagcattttcaatattaatattagataagagaggggaaaactgaagtgagaaaggagagacctttacaggaaaaggagaagtagtaccaggattttgtagtcatacactttcaatttacgtggttagggattttaccgcatactggttgcttt

SEQ ID NO: 3739 - DNA, 435 bp, Lilium asiatic
agcacctatatcggaacgtattaaaccgcttatgtcttacggaggcaccacaagatcagcgcgagagactttaatacactactggtatgcaacatatcagtactaggaaaaagtgaatggaacacaggcttattatctggccatggaatttctgcagggcagagcgctcctaaatgcagttgttaacttggatctgattggatattattcattttctcttaaagagctttgtcataatctttgtttatttgtttttgtaggtagcttgttttttgctctttgtctatttgtctgttttttgttttatcttttttctcttgctgtgtttttttctcctattaaatattttttttcttctctactattgtgaatttattctggttgttcttttttttctttgttttttgtttttttttctttccccttgtttttttt

SEQ ID NO: 3740 - DNA, 417 bp, Lilium asiatic
gatggtccatgactagatctatattatagttaactagaaagccctgccatcatcggaggagcctttggcaggagctgctgctaaagtatatgatggctttgccatcgaggtgcctgggctggggagcaacatcacaaataaacaattctggtcaacttagatatcaaactctcttgacaactttagacatggtgttagaggtaatatagctttgattgagctggatttcaccctctgaattgtgttagaacaggcttttgaagctcagcatcaacaatagtttttttttatttatttttatatacatctgtgtattcttacaaacttcttaatattctttctttttttattatgtttttttttttaatagagtttcttgcattttttttttgtttttttatttaacttttttttttt

SEQ ID NO: 3741 - DNA, 433 bp, Lilium asiatic
cagcgatctagcgatgtcgggacgaggcaagggagggaaggggctgggcaagggcggcgcaaagcgccaccgcaaggtactgcgggacaacatccagggcatcaccaagccggccatccgccgcctcgctcgccgcggcggcgtgaagaggatcagcggcctcatctacgaggagacccgcggggtgctgaagatctttcttgagaacgtcatccgcgatgctgtcacctacaccgagcacgcccggcggaagacggtgacggcgatggatgtggtctatgcgctcaagaggcagggaaggacgctgtacggcttcggcggctaagatgtcaaggtccgagctgaaggatttggatttccaatatgtgcttagttgttctggtctgatctaggtctttggttttagacggaggtctgttatcttttctggaat

SEQ ID NO: 3742 - DNA, 237 bp, Lilium asiatic
aaagccttaaaaatacattacacaaactttgatacgaatatatgaactagggtcgaaggaatattggtggggctcagacatcaagaggattgagcttaagagctctcaagccggcaggcaaagctactcagcggcactgcaatgtctcagaacagccttagatttgcatcaatgcatcctactaacaactaaattgatcacattataaatttcataagtttttttattatatttttt

SEQ ID NO: 3743 - DNA, 345 bp, Lilium asiatic
gctcgtacacacgacagtgtgaccatgtgtttcgattctcgtcatcctgctggagaatgagaagatgtcggtcaggaatttccgccactcactggaggattgctggagagagtggggcggcgagctcgagaggctccgacagcttcccatgaaagaggacttgggccgtatctgaccatgttccgttggtgctctttcagagctgtaaatgggttgttggtttttcttctttttttttttttttttatctttttttgttttttttatttgtgttttggttttttttttccttttttttctttttttttcctttttttttttttttttatttttttctttgttttt

SEQ ID NO: 3744 - DNA, 441 bp, Lilium asiatic
cccacgcgtccgcttttcgaccgggatggcaacggcatcagaatccccgacctggaggcgtggggcgggttgatgggagctgattacaactacttcgagaggggcaacctcgacatcttcagcggccggggaccctgcctgtctttgacgccatgctccatcaatgtcaccttcgacggcaccggggcataccatggttggtactgcaactacatcgaactcacagtgacgggtccgcatcttccttgtgatcagcagctgtttacgattgagcagtggctagctactgatacgtcgccgtacaagcttgttgcggcggtagatgtctgtccttccgctgaggacatcgctgtcgccggagctggaggtggaggccatggccggcgtggtctgtccgaccatgaagcgtgatgtgctggcggttcagttatgttgttgggt

SEQ ID NO: 3745 - DNA, 125 bp, Lilium asiatic
cccacgcgtccgagagtatgcaaccttttgttaccgcgcatgcctgaaggtacaaagggcgggacatgggacaagggaagcagcctgctgacatcactaaggtttaatgagagctgagcgcatgg

SEQ ID NO: 3746 - DNA, 453 bp, Lilium asiatic
gttcatcatcaagaacggtggtattgatacttaggaggattatccttacaaggccgacgacggccagtgtgatgtgtacaggaagaatgccaaggttgtgacaatcgactcatatgaggatgtgccggtgaatgatgagaaggctctcatgtcggcggttgcgcaccagcctgttagtgtcgctatcgagggtggtggtagggcgtttcagctgtacagatcggtagtattcaccggtagatgtgtttctgatttggacctatggtgtgggtactattgtttttcttattttaaatggttatgtactttttgtttgtgtatattttttttggtccagttttggggatttgtttgtttttttttattgaatagtttttttgattattatttttctttgattttttatctttttttttttattttttttatattttaatattatctttttttttt

SEQ ID NO: 3747 - DNA, 184 bp, Lilium asiatic
atttctccctagaaccctagttttcgaaatactgagatggagaccggatccaaggccaagaagggcgccggcggacgcaaggcggtcaaaggctaaatcgggagtcgtctgtaaaggccggacttattcctgtggcggatgggcggtaccttagaagtcgctatgctcacgtgtggttatgagc

SEQ ID NO: 3748 - DNA, 209 bp, Lilium asiatic
atcagcgtgtaacaaacattttttatacattttcttatactacgcaacaacacaaagtgggggggacttattaaaaagaggccggtatatataatatgatttctattaaaaaattaatgtgaaacaggcttataatctgtccatcgaatatctgtatggcataacgctattaaattacacggggcacttggaactgactagaaaatatg

SEQ ID NO: 3749 - DNA, 420 bp, Lilium asiatic
cccaggtgtgtctctgagataaagaaagatgcatggttgccatggtccgatgtcaattaggagtctgaattacctaatcttctcatggtacaattgtggcttttagacgttgtacactacaaaaagaaaggctcgaaagacaacgcacataacttgttactgacggggaactcggatgcttcgttggacaacagacacccaatgaatgatgtgaagctgctggatgtggcataacaaaaacaggctcttaaagcaggaagggaagccttctgtgttcttgaaagtttattgggacaaatgggttgacgaatattaaaaatattatatcaagccttgtgtgtacattttttcaaacttttgtttggttctttttggcctttttttttttaagtatttatttaatgttttctttttttttat

SEQ ID NO: 3750 - DNA, 248 bp, Lilium asiatic
accaaatatagctttgagttctacaaaaggaatagcttaccttcatgaggattgacatacgggggttatttatcgtgatataaaagctgccaatatacttcttgattataaggtcgaggcaaaagtggcggcatttgggcttgcaaaatttgctcccgacaacaacacacatgtttccaccagagttatgggtacctttggatattttgcaccagcttttgcatcctctggcaaacttactgactgat

SEQ ID NO: 3751 - DNA, 442 bp, Lilium asiatic
gcttaacaactagcctggcaacaaaaagctttcttgcgtccttttctcggaacctagctcatgggctgcggaaaaagactgaactgccttgaatctcctcctatatccaagtccataaatccatctcttctatccaaaagccccagactccatttctagattaaaagcatcatgggtttgggagggactctcgcgtacttatcacatctgtttggaagcagcggccacacacacaagaagaagaagaagcagttgcagactgtggagctcaaggtgaggatggactgcgatgggtgtgagctcaaagtcaagaaaaccctatcttccatgtcaggtttgtagtctctgggtgcttcatctattagtctgtctgtcaaggttgtagtctctgtgtgcttcatctattagtctgtctgcaacgttggaggctctgtgtgcctta

SEQ ID NO: 3752 - DNA, 431 bp, Lilium asiatic
cgcattttctccggatcattttgatctccccaaggcttactttgcaacagcagaaagtgttcgtgacacattaataaaaaactggaatgcaacatatgattactatgaaaaagtgaatgtaaaacaggcttattatctgtccatggaattcctgcagggcagagcgctcctaaatgcagttggtaacttggagctgactggaaaatatgcagaagctcttaaagagctcggtcacaaccttgagaatgtggctggtcaagaaccagatgctgccctcggcaatggtggtcttggacgtttagcttcatgctttttggattctctagcaactttgaattatccagcatggggatatgggctcagatacaagtatggcttatttcaacagaacataacaaaagatgggcaggaggaggttgcaaaatcttggc

SEQ ID NO: 3753 - DNA, 314 bp, Lilium asiatic
ggagcgacaaagagactgatcgctttctttacatccgacctgaaccttctcatgtggcggggtcgacacatccggggatgctggcagctttgatgtgaagtggtctcgaccgatcagggaatcgcctgtgaagcggaccggatgtaacgctgcctcacgtgcaattaaaggatccatgcgtttcataagaaatcccttacccgctcatggaatccaagtcaccatacagctattggtgggctctaattttactatatctgtttatgggccatacttgttatgccaattagtttgatgcaatgtttttaattttc

SEQ ID NO: 3754 - DNA, 204 bp, Lilium asiatic
gccacgcgtcgatcatatctctatcttcgctccacctcaaccctatagatacaagatagtattgctgcctacctcgctttacttgtggaactatagcccgcaagcaggatatcagctattctggatcagtgggctgagctgaaatagcggattgagttttgctgctgaataaaggcaggatataactgattgatgcttctggaa

SEQ ID NO: 3755 - DNA, 216 bp, Lilium asiatic
gcccacgcgtccgatccatactacttttgttcgctcgacctcaaccctatagatacatgaagtcatgtgctacctctgctttacttggggtactctagcccgcaagcaggatataagcatatctggatagtgggctgagctaagatagcggattgagttttgctgctgaataaaggcaggatataactgagtgattgctttgaagagaaaattgca

SEQ ID NO: 3756 - DNA, 316 bp, Lilium asiatic
ggagtgacgaagaggacgtgatcgcttcttcacatccgcctgaaccttctcatgtgcggggtgacacatcggaggatgcggcagctttgatgtgaggtgggtcggcaattcgaggggagcggtgtgggcgtaccggtggtcaacgctgcgctcaccggcgatgaggagatcatgccctttcatcaagaaatccttccccgtctatgaatcaagccacattacaccattggtgggccctaatttactatatgggattagggaccattctgttgatcctattggtttgaatgtttggttttaagttaactttttgttt

SEQ ID NO: 3757 - DNA, 362 bp, Lilium asiatic
gctggatatatctcaaagctgcaggggggggtttgttccactccttccatacagtagctacaattctgagttacctgaccaaggcccctcttgtttccccctatactccagtggtgaatgcattgtcgaagctcagggcgatgctagagaacattatgagggcttgcatcggattggcgccgggggacaacatggtcttagagtacacgtgagatgagctctaaccgcgctgacagcgggtggggaaagcttatgcagggtaagggcctggctgatctgattgttcttcagggtattgggcggagcgtgtatggataggactgagtacctggctgtctgtatatgcttggggcgtgatggac

SEQ ID NO: 3758 - DNA, 426 bp, Lilium asiatic
gaaagatgatgctaacaaacatagggaggattctttcacacttgatcatgtcattgccggggcggatgcacactatgagaagtgccggcacccttatccctacattgctacctgggctcctggtggcagcaaatttacacgaactccagcacctccctcggggattgagatagtttacgactatggacaacaggactgtagctgacgcacttaaataatgctgaatatgctcggatgcaaagacattagtactcctttgtcctatccttttcagatcaaacaatgtttcatcaaataagggagaaatgttgttaatgtgcttatcgaagtaagacttgtatcaaatttttaagttgtaagccgatggtggaggcccgcccttttcatctctttttcattgtgtactgaaaatggtgtatctacatt

SEQ ID NO: 3759 - DNA, 76 bp, Lilium asiatic
  modified_base (43)..(43): a, c, g, t, unknown, or other
cccaggcatatgccattgctttaaaaagctttattggaaccgngaaacggaacaaagggggggggggtattaaaaa

SEQ ID NO: 3760 - DNA, 51 bp, Lilium asiatic
cgcgtccgctacttgtaatggaacgcaatgtattactattttgtgttacct

SEQ ID NO: 3761 - DNA, 197 bp, Lilium asiatic
gtccgattcccggtcgcccacgcgtcgcggaccgtgggctgaccttgagctgtacttctggtcctgtcaccagcgggggtttgatcgttcttgggcctctaaggaacgaaaatgtgaagctcagacttggatagaatgaccctatagaatattgcaggcacttttcagtagttgaacagggtgtcagtttgatcctt

SEQ ID NO: 3762 - DNA, 272 bp, Lilium asiatic
ctaagacttaagattatttacaagtttttatcttaggtccttcaggcgagcaaggggggggtttataatttggttgacctacgcttaccatttgtcacaaagattatagtacatttccttgtcaggatctttataactaatcaatctccgtttaaaagcatgcagataccttacttctaataataaaatgatttaacatgactcatttaaataatactatatattctaacgttcaaacacataaatataacttgaacatatacctttctgat

SEQ ID NO: 3763 - DNA, 226 bp, Lilium asiatic
attcccgtcgacccaccgtccgccaaccgacggattttaacccctttgtttcgacccaccaaatcgaaatggggaggaatatcatatgctgccgacctcctgccttacttggtagaactctagcccctcaagctggatctaagcatattctggatcagttggcctgaggctgaagataagcgaattctattttgcttgcttttattagcctccttataacttttta

SEQ ID NO: 3764 - DNA, 177 bp, Lilium asiatic
cacagacgaaaggcagaaaccctgattaagctacgaaccgaattttaggagcggttatattcggtactacttccgcttacttgacctactcgacatcccagctggatataacatattctagatagccctcatagcttagatacctgtagagatttgcttactaagaaattcaacgta

SEQ ID NO: 3765 - DNA, 247 bp, Lilium asiatic
cacatgcgtatgcacaccaatttacaactatttgtgctaacgatgacgttcagcaaaagaggccaggtttttattacagcataacctgccatctacatatccattatcacaaccaataatgcgagaactacataagtataaacacggatatccagccatactttaacaaatgaattatctgtacgaggtacattccttcattgggcacctaactagattagaaacatgccttcaccccctggagcaa

SEQ ID NO: 3766 - DNA, 260 bp, Lilium asiatic
gtctatatatcgcgcgcattctctataggatttactttcacacacacgcgcacacgacaggggagggcttttatagtgtgaccccaatacaaaatactcgccccggcgttacaccacctcgactcgggaaacaccggcgccacacaacataaaatccctgcagcacacatccctttttccagcgcgcgcaatatcgcaaagacgcgcacacatagcgcttttcaacacaggcgcacacccaatatcgcatatgacacgcc

SEQ ID NO: 3767 - DNA, 427 bp, Lilium asiatic
gatttatctatggctttaaattttgctctgtaactcaagatttgaaaatgaataaatgtgtgccgtgtgagtcgaaagatattcgacccatgtctgaacaatcagctactgaattacttcaacaggtacgaggatgggatatggcaaatgaaggtggtatcatgaaattgcacaagtcatggaaagtgaagagttttaccaaagggctggagttctttcagcttgtagcgaatattgcagaggcagaaggacatcatccagatcttcatttggtcggttggaataatgtgataattgagatatggactcactccgtgggtgggttgacagataatgatttcatcttggctgcaaagatagatgctctcaatgtcgaacaacttttgaagaagaagaaagttgcgccttaagagtgtttactgtcctt

SEQ ID NO: 3768 - DNA, 78 bp, Lilium asiatic
atagatcccgcaacatcaccacagatgatgtggtgcgacatgaatattaacaacgaatagaaagcaaaatattattta

SEQ ID NO: 3769 - DNA, 449 bp, Lilium asiatic
ccacgcgtccggatgggttgagtgagttaaacagaggaccaagagctggccgcttcaagaccccaaaagtggctggacccactgttaccattggtgacaaggatcatagtgcagtacctgataaggatcagtataaccgagcagacttcgttgaaaattatccggatgccaaatttttcatcattaaatcgtatagcgaggatgatcttcataagagcattaagtataatgtctgggccagcacacctaatgggaacatcaagctagatgctgcatacaaggaagctcaacagaagccggttgcttgcccagtgttcttgtttttctccgtgaacacaagcgggcagtttgttggtgcggctgagatggtgggtccagttgatttcgacaagactgtcgactactggcagcaagacaagtggactggttgtttccctgtcaagtggcat

SEQ ID NO: 3770 - DNA, 274 bp, Lilium asiatic
gcaactcgataaggcgtagggcatcttatcccctgcagaaatggcacatgggggggacttctctggtctgcccttcgcgccggccgcggcggcggcatcctcccgacacgagcggctatcccttcgcagctcgctcggctcaaaaagccaaaaacccgcaagacatactgaagaggacgtgtcgactgggaagaaggccgctctcgaggcaagatgattcttcgcaacacctctcacatggcaggccagatcgtactccactctgacaggaaat

SEQ ID NO: 3771 - DNA, 276 bp, Lilium asiatic
tccagatctccgagcaccagcagagagtgatgactgctgcggcatggcggcgctatggtctggcggcggtggctcttatggcggtgttatcctctcatctcgcgttctccgccaagacacataggtcattcgtgaggaagaccgtcgccttccacgacatcgtcatcttctccaaatcctactgcccgtattggaaaaaagcaaaagctgttttcaaagaattaaacagtgtacctcatgttgtggagctggaccagaaagaggatgggtcggata

SEQ ID NO: 3772 - DNA, 306 bp, Lilium asiatic
aatacttctagagatatatatctcagagtttttttttggaaccgaaagaggagctaattgagggggttacctataacaacccgcaacacaaacctgtttgcatggacagttgaaggcattcttggtattgataggacaatgattactcactgtttgaatattaacgcaagtagtaagcccgaggcgctggcatgaatactattatctgaggaaaaaaatgtcataggtcgaagtacaaaagctgataaaagtatgatttgtgcgagagttccattaccctatgtggatagcaaacgctgttgtttc

SEQ ID NO: 3773 - DNA, 117 bp, Lilium asiatic
ccacgcgttcgaagaaagagaagagagatttgagtgatgaaatatgtacgtgtggttgattgtctcaaatctctcttctatttcttcgtcagaattaaaacatacaacaatttaatc

SEQ ID NO: 3774 - DNA, 251 bp, Lilium asiatic
gagagttcatctccatggtctactcctccttagtctcattctatccatctacactagcaggggctactcacgttcacttgttgcattaggacaagagcaagctgaggctagtgtccatggattcaagcaagttggtcgctcagaagacatggaaacatgtggtgatgatagagatgaggagtgctttaagaggagaatgacatcagaggcccatctagactacatctacacacagcaccaccacaacccat

SEQ ID NO: 3775 - DNA, 370 bp, Lilium asiatic
ctcacgcatactggaccgaacccgagcatttgatccaagctaggggagcttgcgccgctggcggaatgggtgacttgaacgtgtggaactcgcatacaaagagctaccgccaccgatccaggacttgcccggtctgaggcaaatcacatggactactccgtaagtacgcactgatgtgctgcaggcactgcatacttaacaacgccgaggaaattggcttcatcaagtgtcgttaaggcgactcatgcagcatactctgggggaactgactgatgcttaatttcagtctatgatgctgatctggctgctcggagcttgatcaggagcattatgatgctcctggtaccttgaacttctttagcttaaaaac

SEQ ID NO: 3776 - DNA, 304 bp, Lilium asiatic
ggcgggccatgcttgtgtaacgaatatttttccagtgaccgcgcccaccgagcgcttacagatccgctccgtcccctctttctgactgatcacccacagatccagtggcttctgatttagatcgtaatggcgtcgcttcaagccacggacagataaggccgagatgtatgatcgtggtgttgccggacccatggcggctttcttggttcactgctttgtgtctgcacaagcttgattattgcattgagctgcttaagagggccgtgtgatcgcacttggcaagagctattttggaatgttgagt

SEQ ID NO: 3777 - DNA, 446 bp, Lilium asiatic
ctggtcaccaatggccgaccgccggtgactgcatccccttcattcctgtcagaactcaatcaaaacatacccatctgatctcccggtcattctattcataaatccattatcaattttaggtttccgcttgtagattttgagatccgatcacttttaatctaaaatcctgtgtgcgacctccgattcctagtcaccttcatcagactgtacctgcaaagacttctagagacctatcttctattctctctatttgatggatcattttatcgattgattgcttttgtcttctacaggttctcaagagcattcgagaaggacaattagagggcaccagaaatatctagatcattagagaggacaaggaacgagaagaaaattcagagattatgatgcagatagttgataccctagagtccaagattcttctgatgctgacagccactgag

SEQ ID NO: 3778 - DNA, 350 bp, Lilium asiatic
ctttgggaaagacaacatattcactgactctgatcagtatattcaacaactctaaaactggggatactggcgctgtggctcctaaaccaaaatttgtattgaagcctcggattgcaactagttgtgctaagaggccttgtgttcgcccatctgagagtgacatgcccacagatgaagcgaacactaatggcagtggtacgacgaacgtcctttagtcgatatgcgcaaactatgagagcgattacagtgagtaattgtctgtgcactgtaccattttagcagtttctactcagaagtgctttattttttcttgatatttgtgttcaattactggttctgcctcatatcta

SEQ ID NO: 3779 - DNA, 223 bp, Lilium asiatic
gcgaccgatgctgagcttacattttttttccctgcatgaatagatgaagacgggggaattacgcatgccagcgaaactatcaagcagggaggaaacgatcatgcacggaggccgtgatctgaaaaatctgattgcttcatgaggtgaagacatgtgcaatctcattgcgggaagaggaggcgccatgagcttagaggccatggaacggcttcatgacccatgg

SEQ ID NO: 3780 - DNA, 257 bp, Lilium asiatic
ttagtcatactgggatcctgatgttttgtatggaaagaagcaatcatagagggcggcatactgcatagtagctcaccaactagtctacccaatataccttgtacgtgagactcaattcaatgcttataccagtaggcttctatacacggatctatccaggacctagactccagtgatcaagctcttgatacaggaaaggtggttcgcaagagctgtaaatgcgcaagcatgtcctaattcatccaaattttattttt

SEQ ID NO: 3781 - DNA, 433 bp, Lilium asiatic
gcggatcatgtctgggtcggaatatggatcgtgctgcggcggaggatcgggcggcggcggcggcggctgaagatcggacggatcctcacaaaccggcggaggatcggccggatcctcgagagcctacgccggccgatatgggtctgggggaaggtggtcgaggggacaggggcgaagtcctgatggtcgctcgtcgataaatagggctgcgattggagccctggaagacattgtgaggaggaatgcagagaataactccagcaggtcaccggcgacggccacttggaaaagtacggcctcttcatctgcgtccccggcctacctttctccaagcagctcagctgatcaagaaccgaagcggcagaaagtatcggatgctttaccgcgaaagaacttcattggcttgcccataaggcctggtggtgtaatttgc

SEQ ID NO: 3782 - DNA, 440 bp, Lilium asiatic
ctttctgctatattcgtctttctcgctcgtttatggtgccaaagaaggagaaggctcctgcggggtggtcatagctcgccaagttcggctgctgtatgcagaagaagaagaagtggtgcacgggaaagcagtaggagaagggttacaacgctgtgctgttctatcaggcgagctatgataagatgattgcccaggtttccaagttcaagcagatcacaccgtcggtgctgtctgagaggctgaggatcaatggttcttttgcagggaaagcaatcaaagacttgatggcccgtggtgccattcgtgtggttactgcacactccagtcagcatatttacacccgggctaccaatacctagaagtcctctgcttgtttatgtcattgtccagtcctttttaagagctttttttagttaaccagttttactggtgcttttgta

SEQ ID NO: 3783 - DNA, 386 bp, Lilium asiatic
cttttggatacactgctttttcttcttaggtttattgtcagtggtggggagaaagggtccgcgaactccataccgtcactgggccagactccaaaaacaaggttttcttagatttacacgtagtaggatcgcttgccattcatgaaattcaaatgcccatgaccttgaacgggactacatgaatgccatcaatgatgcaagatttagttagccagggttgtgcccattgcacaaaggaccattatgacgatgagcctcattggcataaggctcaatcccttaacttttacagaacattatgctttctgtgcatttatcaaattccgggaggaagcatgtgaagtgtcaccaatgtgctgattgttaatggtttcataaaatggaga

SEQ ID NO: 3784 - DNA, 417 bp, Lilium asiatic
ttttgaatacactgctttttcttcttattatattgacagtggtggggagaaagggcgcggtactccatcccgtcactgggccgtcccccaaaaacaaggttttcttagatttacaagtagtacgatcgcttgccattcatgaaattcaaatgccaatgaccttgaagtggactacatgaatgccatcaatgatgcaagatttagtcagccagggttgtgcccattgcacaaaggaccattatgacgatgagcctcattggcataaggctcaatcccttaacttttacagaacattatgctttctgtgcatatatcaaatccgcggaggaagcatgtgaactgtcaccaatgtgctgattgttaatgttttcataaaatggatacacatacatcaaaatacttaataattgtagttcg

SEQ ID NO: 3785 - DNA, 424 bp, Lilium asiatic
cccacgcgtccgcccacgcgtccgcccacgctttcgccgccaaggacaaggacaagaagcgccccacctcccgctcctcccgcgctgggctccagtttccggtggggaggatccacaggcagttaaagtcgcggattgcggccaacggccgcgtgggtgcgacggcggctgtgtactcggcggcgattctggagtacctgacggctgaagtgctggagctggcggggaacgcgagtaaggatctgaaggtgaagcgcataacgccaaggcatctgcagctggcgatccgtggggatgaggagctggatacgctgatcaaggggactattgctggcggtggtgtgattccgcacatccataagtctctgatccacaaatctgcgaaggagtgaactttggtgggtggatctagttgggtgtctta

SEQ ID NO: 3786 - DNA, 385 bp, Lilium asiatic
cgaacaaaaattggatggttggatacactgataatgagggcgatatgatgctagtcggaggggacaatccatggcaagaattctgcagcttcgttcgcaagattttcatctacaccaaagaggacgttcagaagatggatcagggtacccttgactccatagctgaagagacgactgttgcaaataagagaaaatctgttgaactgaaagggcaatctacgacaacgactgctgattaagacaacttatgggggggctacaggtgcaagttaagatgtttttggttgtctgtaaaaataaaagagtgatttattcctacgctgtgggcttggtgaaaacaagtttgaaaatgttgaggtcccgccttgtgattcttaaattttgg

SEQ ID NO: 3787 - DNA, 449 bp, Lilium asiatic
aggatgcatacataccagagtcactcttgctgtgcatcggtctttaagtcaaatgagaggttgaaagtttttgatgagggctccagctttgattttctggtctctatagctccggcttcgattttcctgtctctacagctccaaaagcattctatgaacgagcatcaattcctaccattagttcatatcaagcggatagcacagcacataactatcatggcgactcttgcactgaatccatcggcaagcccaatgagagggcgcacacatcggagaaggcttcagctttgcttttcctgcctctgcagctacaaaagacacttctgactcctaaccaccgccaaatccgtagttcaagaagtgagacagcttatctttcaaatcagctgggaaatgtttcaatttgttttagttttatcacgtataagcaatgatgttctgtaattgga

SEQ ID NO: 3788 - DNA, 386 bp, Lilium asiatic
cgtccgactatacgtacatacaaattattctctggcaatccataggacccaaactcaaataagagggcgtgcgtacttatatacatcttctactctcacctaaatgcaaatcaatacccgtcttcttacaacatacatactcagaaaacactgcctttactcaacttaattgccttgcaacacattcctctttctccacctgtcgtaataaccataactaccacacctatctcccttcccaactatttcacaatctttatgacgaatcgtactcactctttatctcttcattaatctcttctcttgttttgtttactcacaacattacccttactacttccaactccctaacgcccactccattacctttcttaccttactttcta

SEQ ID NO: 3789 - DNA, 128 bp, Lilium asiatic
gagaggagttagtgggaagttgagaggagatgtgagaatgagtagagttgaggagagagattgaggagagaaagaggtgaactgagggagattagagagatgaggagagataaagagagagcttagag

SEQ ID NO: 3790 - DNA, 246 bp, Lilium asiatic
accggtcgaccacgcgtccgcgaagcaaagcagcgatgtcttttcgaggcatggttggcaagagactgagcaagggcggcggagtcgtcataatacggaaagtcaggccaacatacacggcattaccaaaccggctatccgccaaatcactcgccgaggcggtatcacgatgatcggaaatcaacactagccttagacaacgacgcgtgctcaagattacttttgttatattcattaatttttctt

SEQ ID NO: 3791 - DNA, 255 bp, Lilium asiatic
accacgcgtccgttaataagaaaactgcttctgttctgagcctcattatcagacaagaatgaggacaagctcgagtgcagtaaaatcttggaggctattaaggcaaacttcaatgataagtttgatgaggtccggaagaagtggggaggtgtcattatgggatctaaatcttatgcaaaaacctattccaatgagtggcttcttcataatgaaattgctctaatgattagcctggttttttgttttttatatatt

SEQ ID NO: 3792 - DNA, 433 bp, Lilium asiatic
atgtgactcatgaccaatcagataagtaatgagaagttgaacgatgatttgttgggacggaccattatgtttcgattgatttggtggatcagttagatccgacggattagaagtcattgtgacgtgcttgagcggtagttttgaccgtttcatggagaatgccgtttattcgatagtttgacccactcacaaaatcgtcggatcttgtggctattgtatatggaaattgtaggttgaggagctcaagcacaatgcctgctaataaccatcgtggatgaatgccctctcagacgggagagtccgatgattagtgatactacctttcgaggtggatcggagatgctccgtctctcgaggatttaccctaggggctcgacgcccgtgaatagacttgtagtcctaatgaaccatggggagcttaaagaatgacgtc

SEQ ID NO: 3793 - DNA, 87 bp, Lilium asiatic
accgtccgattcccgtcgacccacctcgttacgcatagagtgtttatcttgttagtcatctaagaccagcttacgaccgtaatttat

SEQ ID NO: 3794 - DNA, 364 bp, Lilium asiatic
attcatatacaaaatgttcttgatactctattccataaccaacaacataaaaacacgaaagggcaatattcccaaccatcaattattatcaacatcaaacaaatatcgacagcctcactatcaaaaacctccacatctgcacagccatacaaaaaaataaaatgagctactcacagaaaaagcatacctgtttcaatccctgccattgaaaccccaataattcccctcgatgcacaagcgccgcgccaccggctgcaagaataacgcacttaggaagaatctaaagttcaaactgggccgccagccaacgaatacgaaactgtccagcaacaagactgtgcggagggtccgggttcgcggcggc

SEQ ID NO: 3795 - DNA, 419 bp, Lilium asiatic
attgatttacaaaattttcttgataatttatttaatagccaacagcataaatgtccgaaagggcaaattcccaaccatcaattattcccaacagcaaacaaattgcgacagcaccactatcaaaaacctccacatctgtacagccccacaaaaaaataaaatgagctactcacagaaaaagcattcctgtttcaatccctgccattgaaaccccaataattcccctcgatgcacaagcgccgcgccaccggcggcaagaagaaagcgtggaggaagaagcgaaagtactagctgggccggcagccggcgaatacgaagctgtcgagcaacaagacggtgcggagggtccgggttcgcggcggctacgtcaagtggcgcgcgctccgtctcgacacctgtaacttctcgtgggggagcga

SEQ ID NO: 3796 - DNA, 446 bp, Lilium asiatic
aggggcgtgcttgaccacgacacacatgctatctatcgaacggtagatcgaatgagaggcagtgagcatttgatggaggcatcaactgtgattttctagaatgtctaacgacggcaatcaagaaactgggattacggctgctaaagcattctatgaacgagcatcaattcctaccattagttcatatcaagcggatagcagagcacataactatcatggtaactcttgcactgaatccatcggcaagccaaatgagagggcgcacacatcggagaaggcttcagctttgcttttcctggctgtgcagctccaaaagacacttctgactccgaaccaccgccaaatccgtagttcaagaagtgagacagcttatctttcaaatcagttgtgaaatgtttcaatttgtgttagatttatcaggtataagcaatgatgttctgtaattg

SEQ ID NO: 3797 - DNA, 252 bp, Lilium asiatic
gtgtgactaaagaggactttatcgctggttttttattcgccctgaagcctaatcatatcgcggtggtcgacacatacggaagatgctgtgctagctttgattttaaagacacggctgcgcatttcatgggtatacggctgctacagcattatctgatcgtcaacgctgtgctaacattacgatataaggagatgcttgcactttacataaataaaatcgttactcctgctcagaagaattcaagcccaccat

SEQ ID NO: 3798 - DNA, 409 bp, Lilium asiatic
agagatggtccacacgtgtcactaatggtgatcgagttgattgaagtgataaaatcattggtcaatgtaatttggtattgaaattattaattgacttggtaataattttatttactgtttatgaattttcataggaggttatgtttgatttgtcacgaagttgttagccacatcacacatgatcgtgtcgaactaaacctgttgctagggccagggtggcatcctaattgagttgtgtcaagtgaggcaataatatcttgttgatcgacatccataaaccgatagtcattcagctaaacatgtacatatttcaaacatcttagttcatctcaccttagtatccacaagtattagctcgttatttaatatatacaaaatcgactaatcaaatcaataacacctttgacaa

SEQ ID NO: 3799 - DNA, 417 bp, Lilium asiatic
cccacgcgtccggtggcaaacccaaacacagccaaacttgcacgtgcaacgtatgtgtcactgtgaaacgtcggttcaaaacacttacacttaagcgcgagaaacgggagtcagagaaagaagctgatgatgcccgcatgcattaccaatcaactgagatatcgccgagcagtaaaagtaatgatgatcacgattctgagcgtgggaagcctctgccatcgccatcgccgcttaaggcccagattgatttgaatatccagccagagcgtgatgaagagccttcggcaattgcaactgctgccagtaaggcaaggcctttcttaatgccacagttgagatttgggcggttgtcatatgatcaaaaatggctatgtgtgtggtagagctggaccctattttgtaaatattgtttctgtt

SEQ ID NO: 3800 - DNA, 455 bp, Lilium asiatic
  modified_base (291)..(291): a, c, g, t, unknown, or other
  modified_base (447)..(447): a, c, g, t, unknown, or other
gccggccggaaggctgtcatcgtccggaacttcgatgagggcagcagccgcgaccgcccctacgggcactgcctcgtcgccggcatctacaagtacccgaagaaggtgatccgcaaggactcggccaagaagacggcaaagaagtcccgcgtcaaggctttcatcaaggtggtcaactacaaccacatcatgccgactcgctacaccctagatgtggatctcagggatgttgtctccgtcgacgtgctgcagtcgaaggacaagaaggtggtggcctgtaaagagacgaangcgaggtttgaggagaggttcaagaccgggaagaatcgatggtttttcaccaagctcaggttctaggtaagtagctgctgatcaatggaaagttggtttgaactgttatttccatttgagttaatgattttgagacatatttcaggtttgtattcngatgagta

SEQ ID NO: 3801 - DNA, 451 bp, Lilium asiatic
ggaaaatataaggaccaataaaattaaagtatgggtctcacactccctggtaccatgtcagtctgataatgacagctttcacaactcctatgtttagataatactacaggcgttcaattgtatgttactattagagtacaaagaaattgagatgaaggaaaatataaggaccaataaaattagagtgagaaaatgagaggagagaaaatacgatgagaaaaatacaaggaaagagaaatcaaataggagggagaatgagagggttgagagaatgtgaagagagtaaatatgaggagagagaagatgagtagagaaaatgaagtgagagaaaaatatgacgtgagagaaaaatgactttgagagtagagaaaatttgatttatatgaaaatataaagagagaaaataagagggagaaaatgtgatgagaatacataagagtcccaagaaacg

SEQ ID NO: 3802 - DNA, 449 bp, Lilium asiatic
gacgtttgttgctgcatgcaagaagccccctgtattctgcatcatgacggagtacatggcaggtggctccctgagaaagttcctccatctgcaagagccctactcagttcctcttgatctggtcttgaaattagcccttgatattgcacatggaatgaattatcttcattccgaaggaatacttcaccgggatctaaaatcggaaaatatactacttggtgaagacatgtctgtgaaggtagctgatttcggaatctcatgtgtagaaactgagtgtggcagtgggaagggtttcacaagtacgtatcgatggatggcgccagagatgatcaaggaaaaacatcatacaaggaaagtcgatgtatacagtttcggtattgtcctttgggaacttctaacggcgttgattccatttcatgaaatgactcctgaacaagctgcttttgctg

SEQ ID NO: 3803 - DNA, 460 bp, Lilium asiatic
tttcatttacaaaattttctttataattaattaaatagccaacaacataaatgtccgaaagtgcaaattcccaaccatcaattattcccaacagcaaacaaattcccacagcaccactatcaaaaacctccacatctgtacagccccacaaaaaaataaaatgagctactcacagaaaaagcattcctgtttcaatccctgccattgaaaccccaataattcccctcgatgcacaagcgccgcgccaccggcggcaagaagaaggcgtggaggaagaagcgaaagtacgagctgggccggcagccggcgaatacgaagctgtcgagcaacaagacggtgcggagggtccgggttcgcggcggcaacgtcaagtggcgcgcgctccgtctcgacaccggtaacttctcgtgggggagcgaggcggtgaccagaaagactcgcattctggatgtgatgtaca

SEQ ID NO: 3804 - DNA, 158 bp, Lilium asiatic
ttttctggtcgccggcttctacaaacaccacgaagaaggttattccacaacgacttccccaataagacgacaaaaaacccccgcgtaaaggctatcatcaaggtggtcaactacaaccacatcatgcccactctctacaccctagatgtggatctcag

SEQ ID NO: 3805 - DNA, 331 bp, Lilium asiatic
cccacgcgtccgcgcccctgttgctgcaccaccaattgaagacccaggtcacttcccgactcttggtgggaagtaagtaagggatgtgtgctggtgcatgtgctggacttgttttatggatagaaatctgatcactgaaaatcataatctgaatgtgttcagggaaataatgatcttttcattatttatgtatttaagtgattttccatactatgtgaaggatatctttgtcgggttgtgatactctagtttatttttgtcttaaatgtttcgttactgtttttgatatttcctttttttgcctgtcgggttaaaagttatttattttggg

SEQ ID NO: 3806 - DNA, 453 bp, Lilium asiatic
cgaccacgcgtccgaccactcgtccacacccttttttctgcaccatcttgttaagacccaggacactatcctagggtggggtggaagtaagtaagggatgtgaactgacgcatgtgcaatactagttacatggattgaaatctgatcacagaaaatcataatctgaatgcgaacatggaaataacgatccacacaatatttatgtaactaaacaaattgctatactaactgaaggatattaattgcggtgtgtgatactatacaatattatcttgttaaacgacatgccaacaaccgagatacattcatctaaacactgtcatattaaaagacatttattttatgaaaacttaaaatacacaacggtcagcttggataatccaaatatacaaaatcgactcatcaaatcaataacaccttgacaaattccttataataaaaccaacccatacc

SEQ ID NO: 3807 - DNA, 181 bp, Lilium asiatic
acgcgtccgcagagatatatcgatatgttttcaaggcattttatgtaaggggcgcaccacgggaagtagaggagggactttaatacaatactgggacgccacatatcagttctatgaaaaagtgaatggaaaacaggcttgttatcatggcatggaaatgctgcagggcataatgttccta

SEQ ID NO: 3808 - DNA, 161 bp, Lilium asiatic
  modified_base (10)..(10): a, c, g, t, unknown, or other
cccacgcgtncggattttttggtttaacatctggcctccaaagtgaaagcgggatggatggcggacgacagtgcttctataagagaaaggataaacgacagagatagctcatctagatgattctagagcagtcacgagcattgtggagagtttttggagga

SEQ ID NO: 3809 - DNA, 233 bp, Lilium asiatic
gcacgcgttcgcaagcaggtccaccctgattttggaatctccagtaaggcgatggggggggtgaacagcttcatcaatggcatctttgagaagctcgtccaggagttcgctcgcctcgcccgctacaataagaagccgaccatcaccttccgtgagattcagacctacgtccgtcttgtcctcctcggcgagcttgccaagcacgctgtctacgagggcacgaaggctgtcac

SEQ ID NO: 3810 - DNA, 412 bp, Lilium asiatic
accgacgcgtgcggcagagcagagaaagagagagagagttcgaagcatataaagaaggagatatgattctttatggcggcaatttacttggagatcaaggatagtatgtgctggagtggactctgatggtgacatgccatgatgatcaagtaccttggagttgaaggaattcagcatgaggacgacacaatctttttctataaatgaaagaagtctaagcacagttgggggttgctgagacttactccttcctgagaggagaaagctggagtttgaggctgagtctcgtctcttcacagagagcaagagaagggcgtggatttcggtgttcatcgtggctgagatcatgggagttagggggatgcttctcgattgatgctgattccgtatgaagatcacctctgatgattga

SEQ ID NO: 3811 - DNA, 351 bp, Lilium asiatic
ccgacgcgtgcgtccgtctgcgttgtcactaaaagaaggtcccggacaagttactggatcagaccagcgtgagtgatctgtttccaatcacgaagtatcttggcctgctggctaccgggatgacggctgacgcgaggtctctggttcatcaagcaaggaatgaagctgccgagtttccgctcacatggggatatgagatgcccggtgacttattgtccaaagggatagcctaccaagcacagttatatacccagcgatgcctatatgagacctgttggagacactaccacgatcatgagtattgatgaagagaatgggcctcaacttttcaaatgtggcccggctggtcat

SEQ ID NO: 3812 - DNA, 339 bp, Lilium asiatic
  modified_base (37)..(37): a, c, g, t, unknown, or other
cggacgcgtccgcccacgcgttcgcccacgcgttcgnaaaaaaaaaaaaaaaaaaaaaagggagggatattaaagaggggaagggaagaaaaaaaaaaaaaaaaaaaaaaatggggggggtcttttataaaaaaaaaaaatttttctttcttgtttgtgaaaatttttatttttttttttggtacccctaatttaatttctgtggccgtcttttaaaaacgttggctttggaaaaaccctggcttcccccattttaatccccatggagcaaatccctttttcttccgctgttgaaaaaccgaaaaggccctccccttttccttttcaaaagaattgccc

SEQ ID NO: 3813 - DNA, 425 bp, Lilium asiatic
gaaaacaggatttaaggttgtcaaggtttctgatcaggacatcacaatgaaaagtttatcgtgtggggagacttctgttccatatggaatggccgcttggtctactggtattggtacccgtcccgtcatattggatttcatgaaacagattggtcaggcaaatagacgagtattagcaactgatgaatggctgagagtccatgaatgtgatggcatctatgctattggtgactgtgccacaataaatcaacggaaagtcatggaagacatttcggagatctttaaagtagcagacaaagacaactctgggaccttaactataagagaaattcaagatgttcttgaagatatctgcgtaaggtatcctcaggttgagctctatttaaagagcaatcgaatgcgtgacattgtagatttgctcaagg

SEQ ID NO: 3814 - DNA, 318 bp, Lilium asiatic
gcgtccgcaaggaagtatataaccatattctcaatgttcaatataagaacacaaccaacatttgagcagcggttcttaacaatgtgaagggtagtatttccgacatccctactaatggcattcacatggcctccacattcattggcatctctacattcatccaggagatattacggctgttcagcgagcagttcactgccatgtttacaaggaaggctttcttgcactgctacacttgacaaggcctggatgaattggaatacacggatgctgaaagcaacatgaaccatctcgtctccgactatcaacaattccaag

SEQ ID NO: 3815 - DNA, 340 bp, Lilium asiatic
cggacgcgtgggcttctccagacaaggacaccattgaaattaccggatgaacagtttggtgatgaggatagcctggatgaagatttggcagatgcatctgattcagatgcagagtcagattacgatgatttaccacccttcaagtgtttgaccagggtgcagttagagaagctgaataaagcacagaagaaggcgtacttcgaagagctcgactatagagagaagctgttcttcaggaagcaaatgaaggaggaaaagaagcgtcggaaactgatgaagaaaatggcagaagctgctgcaaatctgccgagtgattacagtactgagaacttagatgatg

SEQ ID NO: 3816 - DNA, 448 bp, Lilium asiatic
aattccttcaaaacttgattgtgttgaaattaaaggaagcagtgggtctgacacagtgagcgaaataaacagacgactcacgaacttcaggataaccacggccagaaagttaggcaggattcagagcacccctttgaagcaggttaaaagcctcaaatttgaatctgcgattgatatgctgaaggacaaggaaaacatgtcagtcatgaagactgaccggcctccccagagcaatatcgaaaaatcagcgaaagcaagttcggtgagacggcctctgcagcgtgttgagaagaacaataatgcaggacaataatgaccttttatggtgcatattttcaactattggttgatgggcttatctgggagttgttgatgttgttgtgtaagtttgtaatgttaagttgtgagcctatatctggctgaatatttttccacggctgattgtatt

SEQ ID NO: 3817 - DNA, 464 bp, Lilium asiatic
  modified_base (50)..(50): a, c, g, t, unknown, or other
acattcctcacatactccttacaaagctttattataaagaagcagcctcnactactctgttgtcgtttttaacagacgactggcgaacttcataataaccaccatctgaatgttattcagtattcaaatcaccttttttaatctatttaaaatccttaaattttaatcttcgtttgatttatctaatttacaataatacttttctatcatgattacttactttccttcctatatcaatatttaaaaattattataagcatgtttttttagactttctttgcttcttttttttaataacttttatttcaggactattattactttttattactctttatttttttttattttttatattttctttaactttttatttttttatttttttttttataatttctaatattttatatttattattttattttctttctttaattttttttccattcttttattttttt

SEQ ID NO: 3818 - DNA, 422 bp, Lilium asiatic
gtcgcaccctgtgagaaatacccggtgaatttactagaagggtttactgaaactcaagtgtgggcattagcagttagggataagttacttttagtgggtggattcgagggtgaacttatctgtaagtatattgatcgacctggagtaagcttttgttgtcgaacaactcatgatgacaatgccataacaaatttcttggagatatatgacagatctagcggtgctacacacttcatggctgcaaataacgattgtggagttagagaatatgacgctgagaaagttcaactttgtcagactttccgttttccgtggccagtaaaccacacatcgctgagtccagacaggagtaccctgctcattgtgggagacaatcctaaggggcaactggtggatattccccttggcagggtacgagaagc

SEQ ID NO: 3819 - DNA, 354 bp, Lilium asiatic
cccacgcgtccggtgttagagtataagcgtttttattagagggggagagcacacctacgcgggcgatcaacaggacagacacctgatagttacatcatcaattaagtatctgagccaagttttaaaaacccacgactggtacaatccagattttacccaaccatacaggttctaatcatataccaccgctccactgcttcagttatatatgcgaatagggcctcgatcgcgcatgaccactgataaacagcctgtatggcacatgagacgcctcatgcaaaaagacgtaaaacgctaagaatgtggtaggtacccgacgcttgtagcttttacgggttagaagttcaatttctg

SEQ ID NO: 3820 - DNA, 167 bp, Lilium asiatic
acccggtcgaccacgcgtccgctcagcgccagggtcgtaccctctattgatatgggggttgatccaccactgatctggtggcggtttggaggtgtatatgctgatttgtatcctttcatattactggcttgcgaaatgaaaactcgtcttggctggacagcgaaatg

SEQ ID NO: 3821 - DNA, 301 bp, Lilium asiatic
cattcctgactagaaaagaggcggtgttctaggaaagacattggttttttaggggggggataatttcctggctcagtaagtacatatactaaaaacagtaaagaatgttgaattattataatgctcgagcatatactaaacctgatcatgagagtgatatattcaatgccaatatcgaagatatggtgttacctgttgagtgtgactgattttacgagaaagttcaaatggccatgaaatatattactgctgctctatatttacgagctcattttacagtctattaatgattatgattgct

SEQ ID NO: 3822 - DNA, 219 bp, Lilium asiatic
tttttatttttatttttaactttttatttttcctttttatatttattttttattattttatatttttattttttttattattcattttataattatattataatttattatttaattttcttttaatatttaatttatattaattattattttattttatatttatctttatcatatatatttattattaattttattaattattatttatattttatt

SEQ ID NO: 3823 - DNA, 210 bp, Lilium asiatic
gccattctatcagcagccccttagctttgagcatcgtccaaactactagggctagagtgatgtttggtggttggactgcttatttcagttttagcgatggatatggagtctgttagtccttcagctttcttgtttagacttagctttggtgaacattgtctggtttgtcattatgatcatactttatgaaactcttcctgcatactttac

SEQ ID NO: 3824 - DNA, 116 bp, Lilium asiatic
ggacacatgggaactgtctttgtaggtttccatgattcaaccacattcatacttcggggtgtttgtttactaggcttagcgaaagaataaaacctggacctgtttgtgctgcaaca

SEQ ID NO: 3825 - DNA, 344 bp, Lilium asiatic
acacatctaccatggccgtcgcttactgttattccgtccaactatcattctcgcaagtcggcgttttactcctcaatctgcggctctcgtgtctccacccttcgcctcccgacccgccaccgatgcctacctctctgctcctcctcggccgctgacggatttgacatgtcgccggcggcggtcgtggacccggcgctgcgccacgcgaatgtgctgttcttcaagtcggggtacaacgtgcagatcgtggtggaggaggacgagccggactaggtgctgctgcggaggtttagaagggacagttcgaaagtgggggtgattcatgagtgcatgaggaggaggtt

SEQ ID NO: 3826 - DNA, 430 bp, Lilium asiatic
cgaaggataacctctggaaggcactgaaattaaagaggcctggagagttgcacctgggggagagaatgataaatatcagtatacatacttcgcccacaaagtaaacagctttgagacggcaccaaaaaaactattggcatcagattcccgattacgacctgatagatacttccttgaaaaaggtgatatgtccaaatctggtgcagaaaagagccgattagaggagaggcagagggccgagaaaaggcagcgggaagcaagaggtgaccagtacaccccgaaatggttcagcaataccggcgatatctcacacacaccatggggcgaccttgaggtatacgagtacaatggtaaatactccgaacatagggctacggtcgatagctcggattccattgaggaagtggacatagaatccatagagtttaac

SEQ ID NO: 3827 - DNA, 123 bp, Lilium asiatic
  modified_base (12)..(12): a, c, g, t, unknown, or other
gccacgcgttcntggactccttggccaaaatcaacaagagaaggtccccaccaacctgagcgggctccttattattcataatacataatacataatacccacaccgtggacaatacataatac

SEQ ID NO: 3828 - DNA, 379 bp, Lilium asiatic
gagagggtctcgataatattgctcttgattttccatgcgctgccgggaagttcagggggtatataaagcctgcaaaggggcatggcagattctcatcatcgttatcggatgctgcactcccaggggcttaatccatttacgaaggtgattgctggtctgcatcaactcattgttcttagctaggcatcgacttgatcaactggtatttactgaatggcagacccaaaacgaaccgcgcctaaagagcgcttggatgctcatgaatacaagttcacggcgagaatacttataaacactagactgttgctatacaccttatactgtggctttcgcttttatcgttgctatgatttgtgggacgaatattatcattgcatag

SEQ ID NO: 3829 - DNA, 256 bp, Lilium asiatic
accgtctcgattcccggtcgaccacgcgtcggagagggacactataatatgtttgattcttaggcagtgggtgtttagagggtgtataaagctggacgtggcatggcagttgtaataaagtttcggtggtgatcgacaaggcttatatcatttactaaggccactgtggctgaagtaattcattgtgttagctggcattggtcgatcagctgggatttactgaatggtcgagccaaggtgaacctctcttaaagag

SEQ ID NO: 3830 - DNA, 415 bp, Lilium asiatic
  modified_base (294)..(294): a, c, g, t, unknown, or other
cccacttctccgatggcccgcacgaagcagaccgcccgcaagtccaccggcggcaaggctgcccggaagcagctcgctaccaaggccgctcgcaagtccgccccggccgtcggcggcttgaagaagccccaccgctaccgcccgggcacggtcgcgctgcgtgagatccggaagtaccagaagaccaccgagctgctcatcaagaagcttcccttccagcgcctcgtgagggagatcgcgcaggacttccagacggatctccggttccagagctcggcggtgtcggcgctgcangaggcggcggaggcgtacctggttggtttgttcgaggacaccaacctttgtgcaattcatgctaagaggtttacaatcatgcccaaggacatccaacttgctcgccggatccgtggggaac

SEQ ID NO: 3831 - DNA, 274 bp, Lilium asiatic
gtttagcgtatgtacttaatatatactagatttgcaaaaatccgtgggatgttaaacagggcgggaccattatgagctggcgggccgactctttctcagaaactgcacctactcaccttctctcgccggaagacaaccccaaacctctctttactatcaaaaactattcctcgctataacgtggggggcctctacataaagtgcccaagctctgaaaccaggacgcaccagctgaacctatttttatggcgaaccatgaaagagaccacaccgc

SEQ ID NO: 3832 - DNA, 394 bp, Lilium asiatic
  modified_base (55)..(55): a, c, g, t, unknown, or other
  modified_base (72)..(72): a, c, g, t, unknown, or other
cgcgtccgctaaaatcttcctaccgcccactgacaatggcttccctctcctctgngagcgggagactttgancaccaatctccgccgccgggccggctcttgcgctggcccggcgccttctcacctttcctcgccggcagccgaccccgaaccaccctcttctctcaaaaactctccctcgctggaccgccgcaggcctatgcacagctgcgcaagctctgaagccaggaggcagcggcggagcggagtcgttggcgaacggggtgagagaccggaccgtcgctgaggccgtcaagaacattctggaaatgattttgcgcacgagcatggcagtttgcgcttgtttaggagggaatttccgtctcctgggctacttgcactacttgcgcatttt

SEQ ID NO: 3833 - DNA, 303 bp, Lilium asiatic
ctcagactcacccaaagcttgaatcatgtttgttcggcgtaaaggcgggaaggggctctggaggggcgataccaagcgccaccgcaaggtgctgaaggacaacattcagggcatcaccaagccggcgatcaggcggctggcacggcgtggcggcgtgaagaggatcagcgggctcatttatgaagagaccagaggagtgctgaagatatatttggagaatgtgatccgtgatgctgtcacctacacagagcacgcacggtttaagacagttacggctattgatgttgtctatgctcttaagct

SEQ ID NO: 3834 - DNA, 398 bp, Lilium asiatic
gcaaaatcgcctgcaaccggctccagaaggagctggtggagtggcaggtcggcgccccggcgggattcaagcacaaggtgactgacaatctccagaggtggataattgaggttaccggagcgccggggacgctgtatgatggggagaagtaccagctgcaggtggatttcccagagcactatcccatggaggctccgcaggtgatcttcatgaatccggcaccgatgcacccacatatttacagcaatgggcacatatgtttagatatcctgtatgactcatggtctcctgctatgactgtaagctccgtctgcatcagcattttgtccatgctgtcaagctcaactgagaagcaacgccctccggacaatgatcggtatgtgaagaagtgtaagatg

SEQ ID NO: 3835 - DNA, 120 bp, Lilium asiatic
gtaagacaactttttatacactattattataaaacacctaggggattgacgtgatattattagaacagggtgcaacttcgccagatgccaacagttagacacaagcaaaaaactattgac

SEQ ID NO: 3836 - DNA, 89 bp, Lilium asiatic
ttccgtcgaccacctcgaagacctcactaaactatttgtcatcagcgatgaaaactaaaccgtgattaattctatgagttgtaacttaa

SEQ ID NO: 3837 - DNA, 122 bp, Lilium asiatic
cagagcatcctgtataatcaatctcagcgatttccggccgcggcaagggtgggaaggggctgggtaaaggctgcgcgaaacggtacctcacggtcatccgcgacaacatgcagggcatcacc

SEQ ID NO: 3838 - DNA, 320 bp, Lilium asiatic
gagaggagcttgatgatattgctactgacattgcatgcgctggcggtaagtacagctgatagatagagcatgcaaaggagcatgcttgactatcaccgtctttatcggttgctgcaccgtcaggagctgaagccatttaggaaggagatagctgatctgcatcatctcattgttcttagtgtggcatcgagttgattgactcggatttggggaatggcagtaccaaggtgaacctgtctttgggagtgcttgtattagcatgaatacagcgactggcgtgtatactattaacctatagactgttgctttacatcttttac

SEQ ID NO: 3839 - DNA, 293 bp, Lilium asiatic
  modified_base (24)..(24): a, c, g, t, unknown, or other
gtctgtggttccctgaaggcatcnccgagtgtttgagcagctcccacccctggatctattagcactgagttgtattgtagcccatccaggatttctgagtgaattagtttgatgttgcagtccctttttagactatttggggtactattatgggtgtggtcttttatatccctatattatctgctgatgcatatgttgcaaactggtttatgctgatgtcttttaatatctgcaaatgtggatcctatgtccatgttgcctatattattcagctttattgtgaatcttatatt

SEQ ID NO: 3840 - DNA, 113 bp, Lilium asiatic
ttccgtcgaccacgcgtcgcagatcatcttcaatttaactcagttttcgcccgcaaggatgcagggggtaaagttaggagggttactggcctcttgacaacatttagtatata

SEQ ID NO: 3841 - DNA, 181 bp, Lilium asiatic
acgagcttcacgtgaaacatgagattggtcaaatgcatgaggccgatgaaactcatatgcggagggatctaaaattcaaccaggatattgaaaggattgaactcaccaatgcccaatttaataccagcaacgcctggtccattgagagcattcctaagcctgccaagggattgggctttca

SEQ ID NO: 3842 - DNA, 326 bp, Lilium asiatic
gcggacgcacagctccagtctctaacttttatctgtacgcctatcaacgtgcggacggagaagtaagagccggacgacaatctctatggatgcccattctctttcactgatagtcaaatgagtgtgatctatgacatgataggtgacaaggttgccgaaggtgctgtctacggagatgttggttacgggctccgcagctgctcttaagcaagatgatgcacgtgtcattgacaccgcaattgaccccgatttgtactcttgacgcccttatggatggtctacaagttctcaccctaaaggatgtttgtttcgcggctgtttttttt

SEQ ID NO: 3843 - DNA, 450 bp, Lilium asiatic
cggttgtaccagatgcaggccagcggcactcttctctttccggctatcaacgttaaggagggagtcaccaagagcaagtgcgacaatctctatggatgccgccactctcttcctgatggtctcatgagggccaccgatgtcatgattgctggcaaggttgccgttgttgctggctacggagatgttggtaagggctgcgccgctgctctcaagcaagctggtgctcgtgtcatcgcgaccgaaattgaccccatctgtgcccttcaggcccttatggagggtctacaagtcctcaccctagaggatgttgtctccgaggctgacatttttgtgaccactaccggcaataaggatatcatcatggtcgatcacatgaggaagatgaagaacaatgctattgtctgcaacattggtcacttcgataactagattgatatgcatgggttggag

SEQ ID NO: 3844 - DNA, 452 bp, Lilium asiatic
gcacagaccctgctagaaatacacaatactcatcactatttggggttcttcggctcaatacgaaaagcaattaagggtggcagcttcgactcgtttcgccagagatttatggacgatcgacgtgcccatctcatatctgccatggcatgctcgtgaaaggtctgatctcaaataccagattgctggtgttactggaccaaagaacctgttgaattacatgttttgatatacatgcacgggccattgcaacgaggggtatatgtgagacgacacggtgtccagagaagagtaggcaacggtcggtcaataagacgcagtactgcatttcttaacctctggtggtctgcatttctcgacctcaatgtcattcattgcaagacgaacatcaccaccggatcccagtcatcctttcatttgccatattactctgtgcttctttggcatttgccaca

SEQ ID NO: 3845 - DNA, 229 bp, Lilium asiatic
atccagctcttctataaccagtgtggcttctgtacgaggagctttcctacactgtgcacctgccgtgattagaagcatatctgggcatcctggtgcaagaactgtaagatgtcgccgaagatgatctatccgccgctatacatttgtcaggatctcattgtcaactactgctatcacaactgtggcttggaaggcggagcttccacattttagtaactagctgcgcatc

SEQ ID NO: 3846 - DNA, 186 bp, Lilium asiatic
gatcccggtcgacgacgcgtccgatccaatgttaatactatctcttatctcttatgtttttatgcattggaactgtaaccagatgctagtcattatcagcgtgagcgtcaattttatctcaaaaacttaagattcacacaattttttagccctagtataatgcgtatggcaatagtcattaatttt

SEQ ID NO: 3847 - DNA, 412 bp, Lilium asiatic
  modified_base (6)..(6): a, c, g, t, unknown, or other
cggatncccggtcgaccacgcgtccgataaagacttattacaagctattctcccacttcatgtcatgcatgtgcccagagacagcaagggcgggatcactctggttggagcggagactgcatcaaaggaacttcgtgaactgacagctgtggcggtttgtataccagcttttatataaaggctaactgttcgaattgtatgcgtttggtaaatttctttttatgccttattatgtgtaccttgattgttttgctactgttagtgatatgtttcttttaactcttatttctcttatatgttttttttttttttctttttttttatatttattatatttgtttgtttattattttttttatttttttatttatttttttttttttctcatttttttatctatttattttttttt

SEQ ID NO: 3848 - DNA, 152 bp, Lilium asiatic
ataatctcatttttcttctttttatataacttctctcttctataattttattacctattttatatattattttttttttattttattctctatatttatttttattttatattatttctttttattattctattattttttatcttttatta

SEQ ID NO: 3849 - DNA, 396 bp, Lilium asiatic
  modified_base (18)..(18): a, c, g, t, unknown, or other
  modified_base (294)..(294): a, c, g, t, unknown, or other
ctcaagaaaagattcagnttattatatcttctttttatgggcaagttatcccactctccaccgcccttactgctgcagagttattcagagggtcttggaacattgtgatgattaacaaacacaaagtagaatgatggaagaaatacttaagtcagtgtgcacattggcgcaagaccaatatgggaattatgttattcagcacgtcttacaacatggaaagcccgaagaacgggcttctataatcaacaagcttaccgggacaatagtgaagatgagccagcaaaagtatgcttncaatgtttgtgagaaatgcttggcttatagtactcctgaagaacgtgagattctcatagaagagatgcttggtactactgaggacaatgaacctttacaggc

SEQ ID NO: 3850 - DNA, 345 bp, Lilium asiatic
gcgactcaagaaaggcgctaatgaaacatcttaaactctaaacagggggacctgggggtgggatgagatagcagctgatacggagacctttaaaatcattcatcatcttacactaatagtcaaagatatgaactggccgtagtgataggttccatggaagcaagctcttgttccgacttgtatagtgacaaggcccgtgaatgtttgttcagtgactatcattgaaggcaggcagatcaaatcacagatgcactaactcaaggatgccatctagaagctgctgatctgattacagacgaagtggcagcatgatgggctgcaaacatggatttgaggcttggactg

SEQ ID NO: 3851 - DNA, 261 bp, Lilium asiatic
atttgctcatcattggaggactacaacaagcagattgaacaactaatagaggagatggatgatgctacacaatggggctgacgataataaaaagtgttatccaatcccttgtccaaagatatactggtatcgagcctgatgaaaaatgccggttttgcaaacggaaaatattaactgcaggtggagcaaatgatgtgggcagtggttattttcctgttggatcaatggtttccttttatggtttcccatggcgtcatgcat

SEQ ID NO: 3852 - DNA, 324 bp, Lilium asiatic
ttcccggtcgacgacgcgtccggcgtggaggatcggcagtgaacaagttccgtatgtcgctaggtctcgccagcggccgcgacggtgaactgtaccgacaacaccggggcgaataacctgtacattatcttggtgaaggggatcaagggccggctcaatagcctctcttcggcttgcgttggggacatggttattgcgactgtgaagaagggaaagccggatctgcgtaagaaggatatgccggctgttattgtgaggcagcgcaagccgtggcgcctaaaggacggcgtctacacgtactttgaagataatgcttgagttatt

SEQ ID NO: 3853 - DNA, 430 bp, Lilium asiatic
ccaaaccagaccctaaatcggccatcgccaccggcgtcgtgggtgcggaggttgtccttcgtggcgggattgagccatggatccggtcctccgccgccacactccgctgatcctgctcatctccttcctccttgtgatcgtgtgctttccaacggaggccgaggtcattaccctcactccggagacctttactgacaaggtgaaggagaaagatactgcgtggtttgtgcaggtctgtgttccttgctgcaagcactgcaagaacctgtgaacactttgggaggacctgggaaaagctgtagaaggcgaagatgaaatagagctaggacaagtggattgcagtgtaagcaagccagtatgctccagagtcgacatacatacataccctacatgtaacatattctatgatggagaagaattctcataatat

SEQ ID NO: 3854 - DNA, 221 bp, Lilium asiatic
tgagaatgaactgacagaggatggcgaatattatgaaataatagaagacatgagagaggaagctggaaagtatggttctttggcgaatgtttttataccatagccctactacaactggtgaggatatttctggaactagaaagggatatttggagtatgctgattcaacatctttaatgagggcataagctgccctgcactgcagaaaattgcgtggaaat

SEQ ID NO: 3855 - DNA, 409 bp, Lilium asiatic
cgcgtccgcccatatttacgaacactgtttcgtgccattaatttgtcggcctactgccacccaaaagtctgtctacactaccggctaaaggcgacaatcttccttgcaaagccaccctagcctcttcgtctccattttgtttactaattttggtaaattgaatattaatttctaaaattgtgtttgatattttcaggaatttgactcatgccggaactagcgtgcgggggccgattacaagctataagaaggaagtgggaggctcgatcccgcaagtccgaattacaaaatcaattttataggaagtctttttcttcggagtgagaacaggtgaggaccatgagagggcttcaagagttaaaatctttatttttatagctctatacagaggattattgttttataatga

SEQ ID NO: 3856 - DNA, 439 bp, Lilium asiatic
gtggaggagtggtacaagcagatgccgatcatcacccggtcctacctcaccgtcgtcgtgggcaccaccgtcggctgctccctcgagatcatatcgccgtatcatctgtatctgaatccgaagctcgttgtcaagcagtacgagatctggcgcctggtgacgaacttcttgtacttcaggaagatggatctggactttctttttcacatgtttttccttgctcgatactgcaaactactagaggaaaactcattcaggggaaggacagcagatttcttttacatgctgatatttggtgccactgttttgactgggattgttctaattggtgggatgataccatatgtgtctgacacatttgcaaaaatcttgttccttagcaattcattgacattcatgttggtttatgtctggagcaagcataatccttttatccaca

SEQ ID NO: 3857 - DNA, 438 bp, Lilium asiatic
ctcaagaaaagattcagtttattatatcttctttttatggtcaagttatcccactctccagcggccttacggctgcagagttattcagagggtcttggaacattgtgatgatgaacaaacacaaagtagaatgatggaggaaatacttaagtcagtgtgcacattggcgcaagaccaatatgggaattatgttattcagcacgtcttacaacatggaaagccagaagaacgggcttctataatcaacaagcttacaggacaaatagtgaagatgagccagcaaaagtatgcttccaatgttgttgagaaatgcttggcttatagtactcctgaagaacgtgagattctcatagaagagatgcttggtactactgaggacaatgaacctttacaggcgatgatgaaagatcagtttgggaactatgttgtacaaaaagt

SEQ ID NO: 3858 - DNA, 430 bp, Lilium asiatic
attttggaaaagcttggatttgtgtggcaaaatgaggaaaggatcaaagctcaagaaggagaagaaatgttgcaagcttgataaggatgtgctctcggatctataagtacccctcctcccccatcggattaaaggaagaggtctcactccggaccgagtgggggagggcacattgttggccgtctttctctcggttttggaggaggcacattgggagagcatctacaagtgatttcggagtggagagttcatcatggttcttatttgtgggtctttgttgagctttgagagagtcatgtaagtggagtttgtaaggtttgagtcttggtttatgatgagtttttggttcggatttgtatacattcaaggatggccaaggcctagaatgggatttgagttcttgggttgatcttccattatagtttatttc

SEQ ID NO: 3859 - DNA, 373 bp, Lilium asiatic
gctgctcctacgaaggcgtcgtcatccaagaagagatccaggatggagatgatgaaagttgaaagaagaaaaggcccaagaagaaaaaagatcctaatgcaccaaagagggccatgtctggtttcatgtttttctctaattctgaaagagagaatctgaagaaagaaaaccctggaattgcatttactgatgttgcaagagcacttggggaacgctggaagaagatgtcagctgaggagaaagagccctttgagtcaatggctcggaccgatcaggtacgttacaaggaagctatggctggttataagagtggagctgctcctgtaaatgcagagtctgacaatgctttctgaacagagtaatagtcgtcgat

SEQ ID NO: 3860 - DNA, 424 bp, Lilium asiatic
cacgcgtccgtaataattatatctcacccaaacaataagataataaaaaatcccataactttttaaagatcgcctaaaattatttttaccacctcaatgtgtgtttacaccctcttaactctttatttctcacacaaacaccccactacctaccatttttttccttattcacacttacctacccttttttcaatcatccaccatttcttcttaccaaagttgaaattagagatgagaaatacattcaacattcaaactattacatttttctcattctaccaacccctagctcacacttaggctgcacctaccattaagcattcacattcacctaccatttgaattttcacttataaaaggaggagaaggcaagggagaagttcatccttaacatccaaagccatggaatcattctcaagcttac

SEQ ID NO: 3861 - DNA, 446 bp, Lilium asiatic
  modified_base (10)..(10): a, c, g, t, unknown, or other
cccacgcgtncgagagggtgtcttggaaatcggcatgcctccgactccaaggtcgcttcagatagttggggataatggagaggacatagttttcttctctgacttgtcatcgaatcgaacttctcagacgcaaaacagtatttctaccaattctcagacacaaagcagtacttctaccaattctcatgctaaaagcacatcttcactgatctctaaggattgaattcctggtggttcctcatgtgtccatgtatttatttccatttgagtaagttctttgatagtttatattgagggcctgtttgtttacacctcttataagaggtaaaacacttgtagccgcttatagttgtaaagaatgattataggaggtaaatcactcgtagccacctgtagtggtttgtaatgcgtacttgggtatttgtttgcatcacttaatcaccttt

SEQ ID NO: 3862 - DNA, 403 bp, Lilium asiatic
agaataattataactcacgcggccagaatgattctaaagaaaaccaactcgttgtaaggtggactatattcgtcatcagcagcggaggcaatgatatattctcatatgtctctcggaatggctccttcagttatagcgagaaccgagaattcgttgctactcttatgtcggactacaagaactatatgacggagctgatcgctctgggagcggtggaatacggtgtaggctatatacatagcattgtgtgcttcccttactcgaaccgattagacacttcacatggtagctatggctgcttataagagcggagctgatcctgtaaatgcagactgtgacaatgcttctgaaacacatttatcgacgctcccagagatgaaatactctatatggagtttctatg

SEQ ID NO: 3863 - DNA, 441 bp, Lilium asiatic
aatttggtatcagagctcgccggcctaatctaaccctagccgccgctagcctctctgtggggtctgccgcccgtcacagccactgtcggccctccgacgccgacgtctcctcccaaatgccacactcgggccaccactcgtttagtcgccgcgccgtcgtgaagaccaccagcaccgccactaccaactagtgccgccgtgaagaccaccagctccgccgctaccagcaccgacgctactgtcacacgaacagccagctccaacgtctccatgccgtctcctccttctccgacatctgcacctccatctccttctgcatcccatccacacattcatcgaggcctggaacgccggctgcgaggatctggagttcaacttgcggcgggtccggcggaagtttctgtgagggtttgggtggatctgtaataatggaggcattca

SEQ ID NO: 3864 - DNA, 133 bp, Lilium asiatic
acggcggaatagctcagctaattgagcattaaaaactggaggcacggagatctcggggggggctaaaatctgggcggatgctaagacatctcaaatgcatctaaatcttctcctaattgccaagctgatgaaa

SEQ ID NO: 3865 - DNA, 97 bp, Lilium asiatic
cccacgcgtccggagatctcgaattgtcagattattaactgcgctaaaaaaaaaaaaagggaaagaaaaaaaaaaaaaaaaaaaaaaaaaagggcgg

SEQ ID NO: 3866 - DNA, 96 bp, Lilium asiatic
tcgaccacgcgtccgtgaaaggtgaattgttgaattgtttttatttgaggttttgttctatgaatattaggaactgcgatggagacattggttact

SEQ ID NO: 3867 - DNA, 126 bp, Lilium asiatic
tccgacgcgcgggaggccttcgaccgctaaatccgcgaggagcatgagcgtcgccgggcgctcctggaggcacgtgtggtgccggaaaccaaacgaggattggtgggagtaccttctggatactga

SEQ ID NO: 3868 - DNA, 112 bp, Lilium asiatic
tgtactgacgggttattgaaaaacccgggtcacatacctctgggggggcgactctgtcacccaatgcccgggcctgtgcgcgtgggcattgcaccaggccatctacggcccg

SEQ ID NO: 3869 - DNA, 295 bp, Lilium asiatic
cggacgcgtgatccgtgacgccgtcacctacaccgagcacgcccgccggaagacggtcacggccatggacgtggtctacgctctcaagcgccagggacgcaccctctacggcttcggcggctgatctatccctctatctaggagggtttggttttgctgctatgtttggatgtggatcggatcttggtttatctttatattttgttttgttggatgtaaatcttgtggtatctgtggatctgaatttgatcagcttaaaatttggatttcggtttatggactgcctttccatttt

SEQ ID NO: 3870 - DNA, 378 bp, Lilium asiatic
cccacgcgtccgccctgtactgacgggctatagaaaaacccggttcacatacctctgggtcggcaactctgccacccaatgcccgggcctgtgcgcgtggccattccaccagcccatctacggcccgcagggcccgccgttggtggcgcctaacggcgacgttggaattgacggcatgatcattaatctggcaactgtgctcgccggcgccgtgacaaaccctgacggtcatggttactttcaaggtccggcgacggcgccgttagaagctgtaaccgcatgtacgggcgcgtttgggaaaggggcttattcggggtatcctggtgacgtggcggtggatccggcgagtggggcgagctataatgcgcatggattgta

SEQ ID NO: 3871 - DNA, 363 bp, Lilium asiatic
gaactttggtatagaccttgacagccgtatagcaatggttggtccaaatggcattggcgagtccaccattctcaaactaatctcaggagaacttcaaccaacctctggaacagtgttccgttcggccaaggttcgcatggctgtattcagccaacatcatgttgatgggcttgatttgtcttcaaatccccttctctatatgatgcgttgctttccggatgttcccgaacagaaacttcgagctcacttggggtcttttggtgttacgggcaatcttgcacttcaaccaatgtacactttgtcaggaggtcagaaaagcaaggttgcatttgccgagatcacgtttaaaaaaccacacataat

SEQ ID NO: 3872 - DNA, 319 bp, Lilium asiatic
accggtggagccgccgccggattgagccggacggagtcggaggagaagaaggtggccgtcaacgccgagatggagagagtcaaccagctcccgcacactagtagctactatctgcaccggatgcgagtgctcaacaagctcttacatcttctgtccattaataggactttgtcacaggatgaggaattggatctgctttttgccggcctgtctctgtgaagaggaaacaagggtagctgtcctcagtgctgatgggaaaatggtattaataggtatcgtagcgcagcaatgtataaatagagtgtgcaagacggggaag

SEQ ID NO: 3873 - DNA, 373 bp, Lilium asiatic
gtgattatttgtttgttatttgcattctgttggttgtttggttctagattagggggttggatcattggaatgaaggctttgattttgttgtggaatttggaatggagttcggcttctagggttttgtggcgactgttgattgtgttctatggttgtgcctgttcgagcactccggttgtttgttgttacttgccaactttgtttgtttattgtatttttgcaactttcgtggtataattagttgcttaaacttcaattttgagtagtttaagcttaaatagctttaaaacttatggtgtagaaattatggaaattcgggagcatatttgttaaaagctcactaaagcacaaatttttccagtagtcgtggtgt

SEQ ID NO: 3874 - DNA, 159 bp, Lilium asiatic
gcggtttgagttgttgagaaactgcgctggtcattaccgacggctagaggaggagatggagttcaacttgggggaggaggtgggggtgagggagaatggggagacgtttgagttggagatggccttgctgagtgtgaggtgcatcgaggtgatgaatga

SEQ ID NO: 3875 - DNA, 454 bp, Lilium asiatic
  modified_base (425)..(425): a, c, g, t, unknown, or other
ggaatttgttcgagttcgacctgactaatgtggtgtttccggagaatctgacgactctagatataaaccacaacaaaatctatggaagtattcccaagcagattacagaactgcaggggctgtacttcctgaatgtgagctacaacaggctctgcggcgagattccgaagctcgggcggtatgatcagtactccttcttccacaacaagtgcctctgtggaccaccgctggccgcctgcaagggccagtgattgtaatagtactcagttgttcgttctcttcggtgcaagacctagtgaacttagttgtactcaattgtgcctctcttctgtcttctacatctttctgagatgtaaggagcgtaataattgagatggccatctgtccgtctgttgtactattgatctcgtggtttggtccattgntcgcttttgggaccagacattatataaaa

SEQ ID NO: 3876 - DNA, 302 bp, Lilium asiatic
cccacgcgtccgagcagttcgggatatgttatcgccaaggtgcagtttagcaaggagagcgacaatctctataacgttcactccttcaagcactccgggcttgcgaataagaagacggtttcgatccatgctggggggaaggatctgtctgttgttcttgctacaaccaatactaataagcagaacaagcctgcagagctgtatgacatgtcggtcatgaagaaggagttcagcaagattgcaaaggctgacaagaatcagatagcggacatctactataggcctgatctgaccaaggctga

SEQ ID NO: 3877 - DNA, 319 bp, Lilium asiatic
gggagatgcatgatctggcattcctggttccttggaaggtactgctcgtgctcggggagccctcatacaccgccttctggcgccagcctggcctggaacgcttatccatctctcaccgtctcagccgttgtgactacgccgccggattggcgctcaagtactccgtccatgtgatgaacataaaacgtttaaataatatgatgagtgaccatggaatacattcaagagagaggctgctgatccccatcagcaaacctgacctgctacatgatagtacctgctatattgaactggatgttcatgcaaaaagagaacttgc

SEQ ID NO: 3878 - DNA, 161 bp, Lilium asiatic
catagcctgccgttctctgaggctactttcgaagtcgaacactgccagagagatgggagtgactaaagaggacgtgatcgccgtccttacattcgccctgaatccttctcatctcgccgtggtcgacactttgcggtggatgccttgcagagctttttatg

SEQ ID NO: 3879 - DNA, 392 bp, Lilium asiatic
gctgttatgataggacttgctgccactaatgccattggggaggtagatataactcgtctggttcggagacagataaagataattggttcatatggtgcgagagcaagacaagatctgccccaagtggttaagcttgcagaggctggaaccttcgatcttctaaatactgtttcaagaaaatgcaaatttgaagaactaaatagcatatatcatgatcttgaccagggaaagattgttggtcgtgctgtggttgaaatcactagttgaagaagtcattgtaagctattggttgggggtcagaactactattctccaacaatgaggtatgttaacttggaaccaagatatggctgcagtgtcctctttgaataaagatcctagtttacaaaaat

SEQ ID NO: 3880 - DNA, 397 bp, Lilium asiatic
  modified_base (307)..(307): a, c, g, t, unknown, or other
cagctgcaaggcagaaagctattgtggttgtcatgaaggtatattggggagatccccgcgaaaagttatgtgaagccattgataacatccccttgagcagtattgtcattggaaataggggtctcggaacaatcaaaagggtacttctgggtagtgtcagcattcatgtggtgaataatggtaattgtccagtcacagttgtcaagagctctgatcagcaagcctagcttcactagttctgaacggcaggtagctgaagttgtaagtctaatgctttccttgtctattatgcctgttggggatctangaacctttcctgaatacttgggcttctgtggaggatgatgaaagtttgccgtaacctatgtatgtatatgtgtgcatgtttcagaataat

SEQ ID NO: 3881 - DNA, 385 bp, Lilium asiatic
cagctagcagctctctgacgctcgtatcgttgaacgatggcggagggaaagaagagcactctgaatagctccgatggtgaggaattcgaggtggatgagatagtggcgatggagtctcagacgatccgtgacatgatcgaagacgattgcgccgagagcggcatccctctccccaacgtcaccgtcaagatccttgccaaggtcatcgagtattgccggaagcacgtctagtccgccgccaagccctccaccaccgatgacaaggcgatcgatgacgagctcaaggcctgggacgctgattttgtcaaggttgaccagccgacgctcttcgatctcatcctggcagcaaactatctcaacatcaaaggtatgctggacctgactt

SEQ ID NO: 3882 - DNA, 375 bp, Lilium asiatic
caattctcagtcgtggtattggttggcatggaatcggtattttgttggatggattatttggaacagctaatgggtctacggtgtccgttgaaaatgctggattgcttgcgttgacacgtgttggtagcaggagagttgtacaaatttcagcaggattcatgatcttcttttcgattctagggaagtttggagcagtttttgcatccattcctgcaccaatatttgctgctctgtactgccttttcttcgcatatgttggttccgtcggcctcagctttctacagttctgcaatcttaacagtttcagaaccaagttcatcttgggcttttctttctttatgggtttatccgtcccccagtacttcaacgaataca

SEQ ID NO: 3883 - DNA, 413 bp, Lilium asiatic
cgatgtcgaagctcttcgtgttcgaagccctgctcccgctcggcatcattgccgggatgctatgcatcgccggcaacatccagtaccacgtccacaaatacgctcacggccggccgaagcacatcgggaatgatgtctgggatgtggcgatggagaggcgggacaagaagctcgtcgagaagtattaccctgctgaggcgaattagatgctgaatgctatttgatcgaccgaatggttgcttttagtggggaataatgtgcttttgagaagtcggggagtgcatcctgtttatgtgcattttaacaggcagaattgtatgcttctgtgctgtggacaatttgatttgaatgttttcttttatatttgtacgttgaatcagtctctgatgtggctataagatgatgtttattgg

SEQ ID NO: 3884 - DNA, 129 bp, Lilium asiatic
tcggtgctttcataattttgcagttattttgttgagaggatagatagatatttgaaaagagcgtgttaagcaggtattgcaatgttttgtgtagtgactgttctgtcttgttcggtatgagtttcttag

SEQ ID NO: 3885 - DNA, 81 bp, Lilium asiatic
aaaaaaaaaaaaaaaaaaaaaaattcatttaaaaaaaaaaaaaaaataaaccaaaggagaaaataaaaataaaaaaaaaaa

SEQ ID NO: 3886 - DNA, 424 bp, Lilium asiatic
  modified_base (369)..(369): a, c, g, t, unknown, or other
cgcaattgggagctgtgagcttgcaaagaggatgaatatggtgcagctccaaaagaaagagatgggtaatatctctccaggctctcatatgtttatgcttataaatttgtatgctgtactcatgcctatgatcctgttagcttagtgaggcattgcttgcaataagattttgttgaactgtgtgacatacttatgcctatgatcactatgtgaggttaaataagttgggcataggtggctcttctattttattgctttatgcaagtaattgaccttatgagaattgatactttaccatgtgtccatgtgctttacatttctccgtgctaatgtgcctaggggttgaagatggctctaacagagcaactncccctaggacactattagcaatgttaattgttaattacttggcatatggttatag

SEQ ID NO: 3887 - DNA, 353 bp, Lilium asiatic
  modified_base (38)..(38): a, c, g, t, unknown, or other
acgtgcgtctgctggctgtagcaacattacttttagtncgagcagttcaattgtagcggtgtgcagttgggagctcacattagatgccctggatacttgccattaccaaggtcttatacccaaccagatggtgcgctctgaatctgctgcatctctatgcaaggatgatatttcttactttccagtcagaatcggtgtacagtgcactctttgagcaatgtggaggtgaaactctgaatcttctttgtaagtaatgatatgtcctgaagatactgcactttattcaatgtcttaaaatgaagaatagtttcttgttgtctaattagtcttggaatactgtttttaatttcctt

SEQ ID NO: 3888 - DNA, 395 bp, Lilium asiatic
gtcccctctttccctctccaaattcctctgatggcgcccaagtccgagaagaagcccgcggagaagaagccggtggcggagaagcctgcggaggaggagaagaaagcggccccagccgagaagaagccggcggagaagaagcccaaggccgggaagaaggtcccggcggcatccaaggagggggagaagaagaagaagaggtcgaagaagtcggtggagacctacaagatctacatcttcaaggtgctgaagcaggtccaccccgacatcgggatctccagcaaggccatggggatcatgaacagcttcatcaacgacctcttcgagaagatggcacaggagtcccgccgccttggccgctacaacaagaagaacaccatcacctctcgcgagat

SEQ ID NO: 3889 - DNA, 394 bp, Lilium asiatic
  modified_base (337)..(337): a, c, g, t, unknown, or other
caattccctcatttcaactcagagagagctgaagagatggaatctggaaagatagccaagggtgctgccggccgcaagggcggctcaaggaagaagtcggtcccaagatcaatcaaggctggcctccagtttccagtaggccgcattggccgctacctcaagaagggccgctatgcaaagcgtgtaggttctggagctcctgtctaccttgccgtcgtgctctagtaccttgctgctgaggtgctggagctggctggcaatgctgtcaaggacaacaagaagtctcggatcatcccgaggcacgtctgtcttgctgtcatgaacgaccaggagctgngcaagctgcttgctggagtcaccatctcccatggctgtgtcattcccaacattaacc

SEQ ID NO: 3890 - DNA, 112 bp, Lilium asiatic
aaaaaaaaaaaaaaaaaaaaaaaaaaatttattttggaaaaaaaaaaaagaaacaaaaaaggtgaggaatattaattcttaaaatagacaaaataaaaataacaaaaagtct

SEQ ID NO: 3891 - DNA, 345 bp, Lilium asiatic
  modified_base (306)..(306): a, c, g, t, unknown, or other
gccctccaccttttctttctgttgtaagtaatggaaaccaccaggtaatgaaaggtaaaaaaggtgttagctttgcctatggaggctcaggaattctagactctactgtgactaccattacaatgagagagcagatacaacattttgctactattcggttaaatatgactgccataatgaccttatagaaaaccaacttcttgctctctaaatctctattcgtcatcatcatgttgatgctatgtatatattgtcatatctctctcgaaatggctccttcagtactagcgagaaccgaaattgctnttctactattatctcgaactacatgaactatataacgga

SEQ ID NO: 3892 - DNA, 446 bp, Lilium asiatic
cctctctctagatctcagcgatggccgttagggggaaggcgatcggcgctggcgggtcgaagaaggcgacgtcgaggagcagcaaggcggggcttcagttcccggtggggaggatcgctcgattcctcattgccggcaagtacgccgagcgggtcggcgccggagctccggtgtacctcgccgccgtgctggagtatctcgccgctgaggttcttgagttagctgggaatgctgcaagggacaacaagaagaccaggatcgtcccaaggcacatccagcttgcagtgagaaatgatgaagaactctcgaagctgctggggactgttaccattgccaatggtggagtgatgcccaacatccacaaccttctgctgcccaagaaggctggtggctccaatgctgcggctgctgattaggaggcctaagagttccgtggacttatgtgt

SEQ ID NO: 3893 - DNA, 95 bp, Lilium asiatic
cttgaccaagattgataggcgctctggcttggagttggagaaggagccgaagtttgtgaagaatggcgatgcgggtgtggttaagatgattgcta

SEQ ID NO: 3894 - DNA, 66 bp, Lilium asiatic
gttggaggagctcccatgtcttttttatagcttcgcatacttatcatattgttggtggtatgcttc

SEQ ID NO: 3895 - DNA, 389 bp, Lilium asiatic
  modified_base (368)..(368): a, c, g, t, unknown, or other
cgaaacctgatgttttcaagagccctgcatcagacacgtacgtagtctttggtgaggccaagatcgaggacctgagctctcagctgcagacacaggccgctgaacagttcaaggcccccgatatgagtcatgtactctcgaaggctgtagcatcatcagcagcccaggatgacgaagaagtcgatgaggcgggggttgagccgaaggatattgaactggtgatgacccaggcaggggtgtcgaggcctaaggctgtcaaggcgcttaaagccgcagatggcgatatcgtcactgctatcatggagctcaccaattaatagaaagagaatctgggagatgtttctattagtaaatggtactgcccttgntggtcaatttaagattttggc

SEQ ID NO: 3896 - DNA, 330 bp, Lilium asiatic
catttattgaaccaatcttgactatggttaaatggagggtggtaattaagatgttgtaaaatcatgtagagattaaaagaaaagttgggtaaagcaacacacttcatttaccttcctcttttgtcaaaaataactatagtcgacaatattagttagaagatcgctaactcataaatttcagtaacctctaatattataataaaatttggaaaatgatagtaccaacaaaaaattgagaatgtgcaaaaatatgtctagattttcccaattctagattaaccagtgcaattcaatagtcatttatttatagacttacataaaatagtcagt

SEQ ID NO: 3897 - DNA, 433 bp, Lilium asiatic
cggaataaacgcaaatatgggagagacgatgatgaaattacttacaaggcattggatggtgttcaaattgtaaatggcttggagtgtaagatatcatgcacttcctctaaggtttcttatgttctggacaccgaagattatttaattcgcacacaaaagaggaagcgccattcatatggagttgctgcttcttgtcgtgaccggaatcaatttgctaaaaatagcaatgtcaaagtacagcgatttcgtcggtttatatccagagcctaactacttgtataaagcaaaaggtccagttttttgctcgagggacagatatgaggcatggctgtgcgagtgctcacttgctctattcaaaacaactgtagctggtagaatctccggtatatatgtctcgagtaatttgattatgatggcggatgtgtatatatgt

SEQ ID NO: 3898 - DNA, 103 bp, Lilium asiatic
gatgaagctcacgggtatgtggactactttggttacattactcccacaaggctctcgggaattattgactccaatactcaactgtttacaacttaatttgaat

SEQ ID NO: 3899 - DNA, 126 bp, Lilium asiatic
gtagaagctaaaagcgatgaggactagtttgggtacattaccgtcataaagctcgtgaagagcatcgactgtaagtctgaactgatagccactaactgtgaatggaagggcgtgattgagatcgag

SEQ ID NO: 3900 - DNA, 381 bp, Lilium asiatic
atccaccgtcaccgtctgctgctgatgctcctgcctctaatgatgcccctttaatttgaagagaagcagttctacatgggttgctgctgttgaacttgctgtggctgtggttctctactctggagataatttatgcaggctgtggcatctttctttgagtactttcacctatgcgagtttgtgaatgatgtaatttatctctttcgttgtctcccaacaaagaaaacattagcgattcgaccgaggttttataatgggattgcgtgatgttctttgctggatttttgcttgagtttagcatgtatatttctcagtggagtttgtaaatgggtgactgttggtggttattattgtcatggcctgctgctttctaaaaaataa

SEQ ID NO: 3901 - DNA, 137 bp, Lilium asiatic
gtcagattgagttatatatttatttcgacttatagagatggacgacgaattaaggtacatttttattcttgtttgtacacatgtatcagttacttggttgctatagatataatttatatgaaaaaaaaatgtataag

SEQ ID NO: 3902 - DNA, 401 bp, Lilium asiatic
caaagctggcgtaggccgaagggtattgactcccgtgtgaggaggaagttcaagggagtaactttgatgcccaacattggctacggctcggacaagaagacccgccattacctgcccaatggtttcaagaagtttgtagttcacaatgttgccgagctggaattgcttatgatgcataacaggacatactgtgctgagatagcccacaacatctctacaaagaagcgtaaggttattgtcgagcgtgctgcacaactggacattgcggtcaccaacaagcttgccaggctgcgcagccaggaagatgagtgaaccagttgattgttggtgtgtatggatatgctatatgaggaacagagtttgtctcttgaggttatgtttcttgattttgttgtttaact

SEQ ID NO: 3903 - DNA, 384 bp, Lilium asiatic
gaagaagctaaagggaatgtggactactatgggtacatttttcccagaaggcgcggggaaattattgactccaaaactcaactgttaacaactcaatttgaatggaatggtgttctgaagtcggtttcgagcattttgatcggagtgagcccagagtttgaaattgccctctatactctttggttcttcatgggtggggaagataactacatcaatctcggtccttaccctgtaaacataaaatgttatcgtctaggaaacaataaaattggatcgatatttcctattgctgaaagttaattgtgcaacctgagggtcagacgattttttcgcattcttattgattcatgtattattcatcatgaaccattgatatacttttta

SEQ ID NO: 3904 - DNA, 352 bp, Lilium asiatic
atcgctgatatgattgatggggaggtgtcttccttagtgcccaagtggaagcgaggtccggaaattgaagaagcccaggagaacacatcgacgaacttgtgtcacaattgcgcatcgactgtttcatcgtgtggctcgctttttgactatctttctgcgacgaatcctggctgtggtaacctacaatctgctcgctgccccaatcttgagtgtgcgtctatgcatggcatgtttcaagagataacataccaagccgaggaatccaagcagtgtgtgacagagggtgcacccacagtctttgctagccaggttgataccatcgtttccggagaaagttctgtatcagtctatt

SEQ ID NO: 3905 - DNA, 432 bp, Lilium asiatic
accactcgtacggccacctgaggcccttgagataactcgtaaattcatgaacaaaccagtcagaatccttgtgaagcgtgatgagctcaccctggagggtatcaagcagttccatgtcaatgttgagaatgaagaatggaagctcgacactctctgcgatctctatgagacactggccataacccagagtgtcatctttgtgaacactagccgcaaagtggactggctcaccgacaaaatgatgagcagagaccacactgtgtccgacacccatggtgacatggaccagaacaccatggacattatcatgcgcgagtttcgttcaggctcttaccgtgtcctgatcaccaacgatctccttgctaggggtatcgacgttcagcatgtctcgctggtcataaattatgacctgcctacccagcctgagaacta

SEQ ID NO: 3906 - DNA, 99 bp, Lilium asiatic
cttccgtgaatggtaatgcttgggcctttaatctctttaattggattggcggtaagttcttcaacccttaaccgtcctaagcgggggatcttgggggtc

SEQ ID NO: 3907 - DNA, 431 bp, Lilium asiatic
ctttgatattgtttggagcccattaacatttcttttgggttacaacgatcccgatccttcggaagtgaaatatcctcgcttgcatgagtggcacttccgatcaggactcgatcgatatgtttggattattggaatgatatatgcctactatcaccctactattgagagatggatggagaaacttgaagaaactgaagcgaagataagagtatcaatcaagatctgtgtagcgacattggctctagtgattgggtacctgtggttcgaatacatctacaagttggaacggttcacctataataagtaccatccatatacatcatggattccgataactatacatatgcttacgaaacatcactcagcaattcaggagcttttctcttaccctatttgggtggcttggaaagataacactggagacctacata

SEQ ID NO: 3908 - DNA, 371 bp, Lilium asiatic
attcccgttcgacccactcgtccgaaaaaaataaatcaacaaacaaaacaatctaattgatccaaatcttacatacacatacatacaaggacaataaggcatatatcaaaaaacctaaaatataaaatcaataaacaaaaaaaataaacaaaaataactgggaaaacccttacaatacccaactttataaacccttaacacatccccaatttaccagctttcataacatccaacattcccaaacccatctcttttaccaacagtttcccagaaaaaacctctaatttcactctccatttttcttggcaaaaatcgccttttttataatgggtacactcagaaaaaccccttcacttttcagcgttctaaaa

SEQ ID NO: 3909 - DNA, 350 bp, Lilium asiatic
tcggacagtttcttttcacaaatttggagattactttcctgggacaggacatatacaagacatcggatgtggcaaaggaaaacattacgccctgaatgttcctttagatgatggaattgatgatgaaagctatcagtctatatttaaacctgttatgggaaaagttatggaagttttccgacctggtgttgtcgttcttcagtgtggtgctgactccttgtctggtgaccggttgggttgtttcaatctttctgttaaaggccatgcatagtgtgttcgatacatgcgatcttttaatgtgccgttgttacttctcggaggtggtggatatacaatacgcaatgttgctc

SEQ ID NO: 3910 - DNA, 350 bp, Lilium asiatic
cctaatagcaaccgcgggtggcggatccatttttcacctgctaatacttgttctgttagtagattgaccagtaatgtacccgatatgtgcattctgggctctgagtcaaagacaggggcattgtctacccaaggaaatgagagatatcatggttttgatggtaaggatacatgcattcacagtcagattgctgtggatgatattgagtctcccaatggagaccgggtgcagaccgggttccatttggattttacagacagcgcaaagtttggctgcaatgttttaccatattatattcgaaatgatgccatgggtgtcctatccaaggaccgcttagcttgatagttcct

SEQ ID NO: 3911 - DNA, 321 bp, Lilium asiatic
cctaatagcaaccgtgggtggcggatccatatttcaccttctaatacttgttctgttagtagattgaccagtaatctacccgatatgtgcattctgggctctgagtcaaagacaggggcattgtctacccaaggaaatgagagatatcatggttttgttggtaaggatacatgcatttccagtcggattgctgtggatgatattgagtctcccaatggagaccgggtgcagccggggttccatttggattttacagacagcgcaaagtttgtcagcaatgttttaccatattattctgcaaatgatgccatgggtgtgcta

SEQ ID NO: 3912 - DNA, 440 bp, Lilium asiatic
cccacgcgtccgccaatctccaattctcaattccctctcaaattcctctgatggcgcccaaggccgagaagaagcccgcggagaagaagccggtggcggagaagcctgccgccgaggaggagaagaaagctgccccggcagcagcaccggcggagaagaagccggccgagaagaagcccaaggccgggaagaaggtcccggcctccaagggcaaggagggggagaagaagaagaagaggtcgaagaagtcggtggagacctacaagatctacatcttcaaggtgttgaagcaggtccaccccgacatcgggatctccagcaaggccatggggatcatgaacagcttcatcaacgacctcttcgagaagatggctcaagagtctgcccgtctcgcccgctacaacaagaagaataccatcaccttccgagagatccagacc

SEQ ID NO: 3913 - DNA, 446 bp, Lilium asiatic
ctgttcttggaggttcacatggatgtttcttgacaactcatttaattggccaggggccagggagatttgtcgtcgcggctgctcggaatcctgtctgtaatctgtcactgatggttggtacaagtgatattcctgattggtgttacgtagaggcgtgtgggaaggaaggaaaaaacatcttctcagaggctgcttcggctgaataccttaccctcttttacaataaatctcctatctcacacttgtcaaaggttaaaacaccgacccttttcctcttgggcgcacaagatcttcgtgttccagtttcaaatggtctccagtatgcaagggctctgaaggaaaaaggtgtcgaggtcaaagtgatcgtatttcccgaggatgtccatggaatcgagaggcctcaatcagattttgaaaagtttcttaatataggcatatggttcaag

SEQ ID NO: 3914 - DNA, 446 bp, Lilium asiatic
ctgttcttggaggttcacatggaggtttcttgacaactcatttaattggccaggctccagatagatttgtcgtcgcggctgctcggaatcctgtctgtaatctgtcactgatggttggtacaagtgatattcctgattggtgttacgtagaggcgtgtgggaaggaaggaaaaaacatcttctcagaggctgcttcggctgaataccttaccctcttttacaataaatctcctatctcacacttgtcaaaggttaaaacaccgacccttttcctcttgggcgcacaggatcttcgtgttccagtttcaaatggtctccagtatgcaagggctctgaaggaaaaaggtgtcgaggtcaaagtgatcgtatttcccgaggatgtccatggaatcgagaggcctcaatcagattttgaaagttttcttaatataggcatatggttcaag

SEQ ID NO: 3915 - DNA, 440 bp, Lilium asiatic
cccacgcgtccgaaaagattacgcctaacaacgtggatattgcgaaggttgctccgagttatgatctgtacactccatcataagttgaggcggtgatcagtcgcctctaactttgtcttcaatgttgaaagcatgtgggaagacttgtttgtctgatctgcggcctgattttccaaagcctctttaaacgttatttgtactgaaacaggtttttgtctgctctattcttaaacaagatgaattgtgcttcgactctaactgggtagttctagtatctgacctttcgtctccaattcatgcaagaaatatttctttcattcccaaaaaagacatctgaagaaaaaggtgtcaaggtcaaagtgatcgtatttaccgaagatggccatggaatctagaggcctcaatcagattatgaaagatataaaaaggggcggcctttt

SEQ ID NO: 3916 - DNA, 314 bp, Lilium asiatic
cggacgcgtgggttctgaatcatttacagattggttgtttccgatgaagatgatatggattgaattagggtaaaaaaaaaaaaaaaaaaaaaaaaaaaaaaaaaaaaaaaaaaaaaaaaaaaaaaaaaaaaaataaaaaaaaaaaaaaaaaaaaaaaaaaaaacataaataaaaaaaacataaaaaaaaaataaaaaagcaaactattgagaaagacactgtcacaaaaattgaaaataattacatttcgaaaaaaaatttaattacaagggcttcaaaaaaaatattgaatgaaattaatttataattaacat

SEQ ID NO: 3917 - DNA, 180 bp, Lilium asiatic
cgaggataaaaaatccaatcgggtaatatggttatgctgagtttgcggcttgtgcattttgcgtcctgaaagagtatgatcatagtccgaccacgcacaaacaagctttgcctaatgctcacgcaaaggagtggaacgaggctattgatgaagagattacatctcttcataaaaatcata

SEQ ID NO: 3918 - DNA, 364 bp, Lilium asiatic
tcggccacgcgtccggcgagagatctgagctcggtcgcccgaacatgagggcgaagtggaagaagaagaggatgaggaggctgaagaggaagcgccgaaagatgaggcagcgatctaagtagatcctgatgcagtggccttcatcaagtggaagatagttgattggtctttcatcttgctgttggtttctctgttaatgtctggccttaaaatgcttaggcatctaaatttcctgttttgcagctttagtatgtcctaagacttcaaatgttatgctttttgttgactctgtgagacaatggtgttgaaccatatttgatctcttttgagatgtttaatgttgaatggtagttatttctagatt

SEQ ID NO: 3919 - DNA, 209 bp, Lilium asiatic
ctaatttatcatcaatcatatcaggacctgtttaagattggaaggcgcaatgcaaattcagggctcagagatattttaaagtgcaacaggccaacatccagagcattttcaatcaggctatctttcgacacactagcatactctacataaatacgttccacatctaaatttactaatctacacaaattctaaccaaccttttaagacct

SEQ ID NO: 3920 - DNA, 354 bp, Lilium asiatic
ctgatccaatcgatctaatgcaaggaaggctttgacgaatcacgggaggcatggcgctgcgggagcacgataccgagcaccaggatctagagctacatcacaacatccaatgcatcaccaagccgtgcatgtcaggaccatgcctacttggcaagcaactaatagtagcaccgcctcgaatcactaacacaacaggaatctgcttagtcactatccatataacttcagactatacgttcaaaccaccaaaggttgccttcaaaacaaaagctgtaccattcaaacatcaacaacaatggaaacaatttgcattgacaattctaaggatcattggaattctgcataaacagtctc

SEQ ID NO: 3921 - DNA, 451 bp, Lilium asiatic
cccacgcgtccgcacagatccaattatgtcatgacgaggcaagggagggaaggggctgggcaagggcggcgccaagcgccaccgcaaggtcctccgggacaacatccagggcatcaccaagccggccatccgccgccttgcccgccgcggcggcgtgaagaggatcagcggcctcatctacgaggagacccgcggggtgctgaagatctttctggagaacgtcatccgtgatgcagtgacctacactgagcacgcccgccgcaagacggtgactgcgatggatgtggtgtatgcgctcaagaggcaggggcgaactctgtatggcttcggcggctgaaagtcgaggtggctttagtagatgttagtgtcagtagtagttttagatggacttgggctcaagttcttgtaatttgtcagatttcttatctgatatggaaatttaaaaagtttg

SEQ ID NO: 3922 - DNA, 426 bp, Lilium asiatic
ccctaaccctagctgcgcagattcttgagtcggtcacgatgagccgcagcgctggagccggcggagctaagggaggagccgccggagcgaagggagggaagaagaagggatcgaccttcacgatcgactgcgggaagccggtggaggacaagatcatggacatcgcctccctcgagaagttcctccaggagcggatcaaggtcggcggcggcaaggccggcgccttcggcgatgccgtcaccatcacccgcgagaagagcaagatcaccgtcacttcggatggccccttctctaagcgatatctgaagtacttgacaaagaaatacttgaagaaacataatgttcgtgactggctccgcgtgattgcgtccaacaaggatcgcaacatttacgagctgaggtacttcaacatcgcagataatgaag

SEQ ID NO: 3923 - DNA, 259 bp, Lilium asiatic
cccacgcgtccggaagaatcatagaggtagattggagaggagtaggagaagaagcaaaattattctttctctggtgatcttgaattcgttctctagtgatctcaatttcgtcaatttaaagttcagtttggttctgttttattaaggtttagtttgtagttattttgtttaaatttaaaattcagtctattgggtttagagttctgtgagtttgaagtttattgattgtggtttactatttaaattagagttactatct

SEQ ID NO: 3924 - DNA, 384 bp, Lilium asiatic
cccacgcgtccgccaagaattgcggtgtcaacatcccctacaccatcagccccaacactgattgcagcaaggtgaggtaaatccctgtatggagtcactgctaatactacttagctgctgctcttattattattggtacttcttggacagagcagcaggaataaaaatgagttctgtcttgattcaccaacgtttggtatttgcagtgttgtaatttactgtttcagctaataatgttatgttttagactctcattatcttgtatgatggggtctgtagcattgtattaaaattatgttttgcaaattgagttattgctcggtatgaacgagaatttgagaaaaaaataaagacacctaaaaacaattcacttaccgacatttt

SEQ ID NO: 3925 - DNA, 374 bp, Lilium asiatic
tcgcggatgtggaggtgcttgctgcggtgctggctgagtccgtggaggaggggaagtgggcggaggtaaaggggagggcttgagagattgcaaggaaagcacgggaagctgttgcagaaagggggagcttcttcaaggatattgaattgctggtgaaagagcttaattcaatgggaatcaaatttttgtggataattttagggttaacttgatgtgttagaatgatttggaaattgttaatctttgccaaaagggttccaaaaggccaaccataatgtttggctttatccttccttttgttcattattatgttccttacagtagatttactccaaaaaattaagatttaattaaaggttatatatatatatttt

SEQ ID NO: 3926 - DNA, 278 bp, Lilium asiatic
gtttacctaacatccaagaggacagagcttactttgcacgctgacctaccgagcgcccagttatgccaccaagtcgaatcatacaggtcgtcagactcagagcgagctagttccatatactaacagaggcatgcaaccaaatttccgagactgtaagaggattcaggggattcgtacctgaagctacttattatgaagactggtgtctagaattgatgataggaatcggcatatagagggtgctattagcattcttgagcaaaggatattctggcctg

SEQ ID NO: 3927 - DNA, 312 bp, Lilium asiatic
gcggggctgcagcactatggacacggtccacttgatagcagcgtggtgatgctggagtcggacggatgtggagctgtgcaggtaggccggaataagtcggagttgggttgtgctgtgcaggcaggccggggtaagttggagctgggccgtgttggtggtggaagtggggacgagtcggtgagtctctgcggtggacacatgacgagagcaacgagcgtcaactagtggcctggagctgggccgtgttggtggtggaagtgggatgtgttggggatggtggtggaagtgggatgtgttggggacgagtcggtg

SEQ ID NO: 3928 - DNA, 318 bp, Lilium asiatic
cagcaattctggatgaagacagcaggaagcttcctaagcttaatgatgatactgcagattatgtgaaaagaggcttaactccaaggtggagtgatctggatgtcaaccagcatgtgaacaatgttaagtatattggctggattcttgagagtgctccaatttcgatccttgagagccatgagctggctggaatgaccctggaataccgaaaggagtgctcgagagacagtgtgctgcagtccctgaccgcagtcttccctgacaacactgagtgtaaccatcttctccgaatggaatgtgggacggagattgtgaggg

SEQ ID NO: 3929 - DNA, 352 bp, Lilium asiatic
cgaatctctcatcaatcatgtcaggccgtggtaagggagggaaggggctcggcaagggcggggccaagcgccatcgcaaggtgctgcgggacaacatccagggcatcaccaagccggccatccgccgcctggctcgccggcgcggagtgaagaggatcagcggcctcatctacgaggagacccgaggcgtgctcaagatatttctggagaacgtcatccgtgatgccgtgacctacactgagcacgcgcgccgcaagacagtgactgcgatggatgtggtggatgctctcaagcgccagggccgcaccctctatggctttgggggtagatctgattctgtttattcggatct

SEQ ID NO: 3930 - DNA, 440 bp, Lilium asiatic
cccacgcgtccgctattttgatttatttgttaaattgaaaaatgatcaagaacatctattgagaaatatccagaggaacgagtatcataacctctttgattttattagcgaaaaagggttgaaaatcctgaaccttgaagctgcacaaactacaaatagtgttgcagctgttctcgaggatgctgatgatgatgctgttgatccacatcttgaaagaataaaaaatgcggccggcggagaggaaagcgatgaagaggatgaagattttgtgattgaaaaagatgatggtgggtctcctactgatgattctggtggagaggaatctgatgctagtgacagtggagctgaaaaagaaaagcctgcaaagaaagaaaccaagaaagaagctgcacctgcaaaggctcaatcttccaagaagagatccaaggatggagatgaag

SEQ ID NO: 3931 - DNA, 317 bp, Lilium asiatic
catacccttagttattgtgcgacctagtattataactagcatttacagagatccattgcccggttggatggaaggaagaaggactattgatagcatgataatcggttatgctaaggggagacttccttgcttccttggagagtttgaattggtgatggatgtaatcccgggagacatggtagtgaatgcaatgattatgaccattgtgcatcatgcaaaccagaattctcagtccatataccacataggctcatctgtgaagaatactgtgacattttcgatccttgagagatctgggtacccgtatttcgatgaaa

SEQ ID NO: 3932 - DNA, 416 bp, Lilium asiatic
  modified_base (370)..(370): a, c, g, t, unknown, or other
cccattcccaaatccgtggatcgatccgatcacgccgggccgtaacgatgacggaggcgatgctgaggaagaagccggggatggtgagcgtgaaggatatgccggtcatgcaggacgggccgccgccgggggggttcgcgccggtgcgctacgctcgccggatcccgaccaagggccccagcgccatcgcattattcctcgccaccttcggcgctttctcatggggcatgtaccaggtcggcaaggggaacaagatccggagggagctgaaggaagagaaatatgctgctcgcagagccatactgcctgtgcttcaagccgaagaggacgaaagatttgtgaaagaatggaagattaccttgaagaggangcaaggatcatgaaagatgtgccagggtggagggtggcgagagcgt

SEQ ID NO: 3933 - DNA, 446 bp, Lilium asiatic
acgaggctcccaccaatgtggggtactggggagggagggtcagatgtacgcagccttaccctacaagcggctgtttccagtgatctctaggtcacattgcggcaaccttaaccgttgcgccagtcaccctccaaggctataaaagggcctgatcaggacgatgaccaattgtcggtgcagacccatttgcaaggctataaaagatgcaaggctataaaagggcctgatcagatttagggtttgtgtggccaatcaagagattagaagagagcaattagcgccgctattactgcctcaccactgatttgatgagaactcttcgaaccttcatcagggtaaagattgagagttgcttggcttgtatttgaggggtgagatgtgttcgcctgagatatgggttatcctcattgcttctctcttttaattacttgttttagtgaattctc

SEQ ID NO: 3934 - DNA, 334 bp, Lilium asiatic
cgcatcttgctcctgctctccttcacctgcgttgaattctcaccggcaaccatggcggcggcggtggcggccacacaggatgtgaagctattcaaccgctggaccttcgaagatgtcgaggtcagtgatatgtcgctgaatgattacatctctgtcaatccctcgaagcatgcaacctaccttcctcacaccgcaggacggtactcggttaagaggttccgtaaggctcagtgcccaattgtcgagaggttgaccaattctctgatgatgcacggccgtaacaatggaaagaagcttatggcctgtcgcattattgaacaatgcatggaaatca

SEQ ID NO: 3935 - DNA, 293 bp, Lilium asiatic
tcgatcactcgtgccttggaaaggtggagtaataattggtgtcctcgactttggtcgtgaagcaggggtccatagagaggagtggatacagaatggaattcacatagggagtggcagaaaatacagtggatcatattatacgcaggcacttgctatgtgttatataaattcttaatagatgcaaggctggttggtttaaagaaaacttcatcttctttaaactggaagagtttgttctcatggaggtgagcatatctctctcaatgtgtattgattgaagaaaagatgtcgga

SEQ ID NO: 3936 - DNA, 209 bp, Lilium asiatic
cccaagctcaggtacagaggatcgctcgcggagacgtcttcatagcgtggatgagtgagcggaaagggttacaaactcgcagactagccgctgatgccattcgtcagatcaatgatcgggcttagtatcaatgactagtgacagtaacgcatctacagcttatgttcgcgaccatgcacactggtaatgactagaatgcttatgaatac

SEQ ID NO: 3937 - DNA, 249 bp, Lilium asiatic
ggcaggttagtttgaatggcaatgttaatgatgtcatcatcaatgcccgcacaataaaattggacgccctagaaaattattcaatatcctctagtatgttgtaaattaaatctttttcttaaaatgcttattctctcttatgttgtataagatgcattttgtaatttggattgtttacgctgtaaccgggtctagtttttatatgtattgagataagttaataatttttttggcactagacacacacat

SEQ ID NO: 3938 - DNA, 371 bp, Lilium asiatic
ctttggtatacgacctcatttccacccattttctggttataccctagaaattggaaccctggaatgcgtctcgccgtccggtggtcctcacgtactcaattgctggctctaatctctcgattttgtgtatttattggtattattagtgatcttgcaggggattgtgatgctcgggcattcacagaatcgaagcccacagaccgaatccaccgatctggatccgaagaacacgaatagtttactcaatcggagaatttgagctttgaaacttaatagatgcaacaagggatttatccatatttgcatatttatggtttaaactcattactttcatttcaattcctaacgcaatatgatgcttatacttttat

SEQ ID NO: 3939 - DNA, 418 bp, Lilium asiatic
gcggttactgatgaccgttacattgtggtggtgactggctcaacccagctcttccaggcggcgctttatgccctgtctccgtcgaatgggactaggccgatgagtgtggtttctgcggtaccgtactactcgctttcgcgtggctgaaatgtgagaaaaatggagttgaagattgcgagacttttctaaggagccataagatccttactcggggtggaaagcatttcggggtagaggcaacattcgtgagggtcagcatgcttgatcgtgatgaaactttttatctttttactgaaagattatcatccatctcatgaatgctcgtgtttgtgttcaatcttcgaagagtctttagaagggaatgtagatcaaagttttcctttttcaagagtgtaaggttttagaatttatatatcga

SEQ ID NO: 3940 - DNA, 436 bp, Lilium asiatic
acgaggctcccaccaatgtggggtactggggagggagggtcagatgtacgcagccttaccctacaagcggctgtttccagtgatctctaggtcacattgcggcaaccttaaccgttgcgccagtcaccctccaaggctataaaagggcctgatcaggacgatgaccaattgtcggtgcagacccatttgcaaggctataaaagatgcaaggctataaaagggcctgatcagatttagggtttgtgtggccaatcaagagattagaagagagcaattagcgccgctattactgcctcaccactgatttgatgagaactcttcgaaccttcatcagggtaaagattgagagttgcttggcttgtatttgaggcgtgagatgtgttcgcctgagatatgggttatcctcattgcttctctcttttaattacttgtttta

SEQ ID NO: 3941 - DNA, 378 bp, Lilium asiatic
cacactcccaattcggcggaccaagcttcactggaacaaaaccaggatatgtacgagaggtcccgtaccaaacaatctaaaggctttagaaacctactgaaattcggcagaaagaccaactcggcttctggtgagagtaaccaagattcggatggatcggtcatggatcaacatgaagcatctggttcttctaatgatgttaatttactgaagaatctcatttcacaagatgatcatgctggaagcactgcatccaaagggcataatgtggtggggagaggatggcacaactcggtatgactccctttaggttcgccagatgtgaccttctctagtcaaccacattcgacatccgaaaatgttttcgggccccttctt

SEQ ID NO: 3942 - DNA, 310 bp, Lilium asiatic
tcggtcggatgaacccacatagcatcctccatttctcggcaggttcgtgaaatacgggtgaatgtgatttttagggttggtttatgcttgataactgttgtcatctcttgcatgttcttgatccgaatcgccaagtgtggatactagtatgagcagacctatgccttcatgccgctccttccggcctgcatggtgctgctctcgagatctgtgtttgctccgttgattcctgtgattggatacagagcggtgcttgctctttctggttatgtgctggataatgttgcatttgttctaactgtgtgctact

SEQ ID NO: 3943 - DNA, 418 bp, Lilium asiatic
ctcttcaccagatcgagaggctcagactcttaacactcttccatgtgtagacgctaaccgggaaggaaactgactttctaatagaactcactgatgccactgattggatgaacgatcgagttgagatcgaagtcgtgatgatatcaatgcataaacatctcatgtatgctggcatacaactcgtagatgacacgactgtctaagcatacatcatcgaaggccgttctgctctacatctgagacttgctgagactggcacgttatgaagaaactcatattttagagcagagtcatgtaatgcgcggagtagtatgctctaacatatataatgttaccccttgattggtactctcatgcaaactgatgcttgtcttgaattggatatcagtttctggatcttgtgatgctactatgtggt

SEQ ID NO: 3944 - DNA, 333 bp, Lilium asiatic
ctctgatcaatcatgtcaggccgtggcaaggtagggaaggtgctcggcaagggcggcgccgagcgacatcgcaaggtgctgcgggataacatccagggcatcaccaagccggccatccgccgcctggctcgccggggcggagtgaagaggatcagcggcctcatctatgaggagactcgaggcgtgctgaagatctttcttgagaacgtcatccgtgatgccgtcacctacactgagcacgcgcgccgcaagacggtgacggcgatggatgtggtgtatgctctcaagcgccagggccgcactctctatggctttgggggttgatcttgttct

SEQ ID NO: 3945 - DNA, 338 bp, Lilium asiatic
gagagctgaagagatggaatctggaaagatagccaagggtgctgccggccgcaagggcggcgcaaggaagaagtcggtcccgagatccatcaaggctggcctccagtttccggtaggccgcattggccgctacctcaagaagggtcgctatgcaaagcgtgtaagctctggagctcctgtctaccttgccgacgtgctcgagtaccttgctgctgaagtgctggagctggctggcaatgctgccaaggacaacaagaagtctcggatcattccgagacatgtctgccttgctgtcatgaacgaccaggagctgggcaagctgctcgctggagtcacca

SEQ ID NO: 3946 - DNA, 434 bp, Lilium asiatic
tcaaggtccacgagctccgcaccaagtccaagacggacctcctaacccagctgaacgagctcaaggccgagctcgctctcctccgcgttgccaaggtcaccggcggcgctcccaacaagctctccaagattaaggtggtgaggctgtcgatcgcgcaggttctgaccgtgatctcacagaagcagaaggcggcgttgagggaggtgtacaagaagaagaagttcatgccgctggatctccgtccgaagaagacccgcgccatcaggaggcgtctcactgcccaccagtcttctttgaagaccgaaagggagaagaagaaagagatgtactttccaacgaggaaatatgccatcaaagcttgagggagctttctgcagttggtttttgagttcaaaagtctagttttgtacttggaagtttctggtacccttttc

SEQ ID NO: 3947 - DNA, 450 bp, Lilium asiatic
  modified_base (347)..(347): a, c, g, t, unknown, or other
gtgtccatgtccccctccgactcgagcgaataagtcgtgcatctcctcaccgacctcaaaagcgagtgcacatctcctccctccgacggtgggtcgccggtatggaagctcgacagctctgagcccaacggccaacgatatgtgacactaaacgggtctccgcataacgaaatcaaccaggataacatgttcaaaattgagaaagcaggtgctttgggctacaaactgctatactgccccagtgtagccggcgtccctgccgatggtccttgcggtagtctgggtatatacttcgaggatgggaaaaggtggttggttctgagcgaccagcccttcttggttgtctntgtcaaggcataaaccctcgcagatatccctgttacgcacctcgactctcatgaaataagtgcttatgaccgagtgtctgctatgtgtatcagtacgaggagt

SEQ ID NO: 3948 - DNA, 255 bp, Lilium asiatic
gccatggaaaagatgtctgattattctgtttttgctgatatacttagtgtgctgaggggagggcttgataatattacactggacctatgcactcgtctcctaccgctgatcacacgcctttttgactgctagatagacaggcatttgtgcatattcttggagatggctcttaatctagcgagaacttttgttcctgatatacattcctcggagactgtttttaggtctttagttcattgttgatgttcctgcatt

SEQ ID NO: 3949 - DNA, 339 bp, Lilium asiatic
gcaagcgaaagattttgcacatcttggatcctcgagtggaaggacaatactcactggccggagccatgaaagcctctgcgctcactctcctttgtctatccatgaatgctaaattgaggccaagcatggaccaagtagtatcctcactggaacaactccaagaggcgaacgctgtctctcgaaacactgagaccgatcagcacaggagtggtcagagtctcgagaaaagcgaacaccggttacaacgaaagaactaggaaaatggaagtgaaaacgctgcttaccatactcttggttcccctcttattcatgttggatgatcgaggaggaactgtaacc

SEQ ID NO: 3950 - DNA, 372 bp, Lilium asiatic
ggaatatgaaactttaattcgtctagctatgtgacatttgaagagactgaatattgtactggggataaccagaggttagtcattgatcatgagggtggaaggtaggtgactctatgcaagtgaaattctggactcgtatagcgagggaacattttaagttcaacatcatacgtttatggaagctagtaggatatcactgactattaaggctctaattacgttgatttggtgaccttatatactacccactaaccattgtcgacgatgtaatgaccacatttagaatggtcgttgaaaacacataatatatgcaatatgacgcaatcatggccgaggagaccaaagctgtttactagaacaagattcatgaac

SEQ ID NO: 3951 - DNA, 390 bp, Lilium asiatic
  modified_base (350)..(350): a, c, g, t, unknown, or other
cgatgagtctgttctgtggacggagagccatgatactggtggagactaccgatgcataagagtggtgaacaatattgcgttgaactttgatgccttccacggggacaaggaccatggaggagtgcgtgatggaactcaagttgtcctttgggagtggactaaaggagacaaccagaggtggaaaattatcccctactgataagtatgatggatgtccattactatctagtgtgcttgtactatgaggcccacctgcagaataagttcacctttcagaggtgagtgcgcgaccatcttcgcttttatgggcatgagttgtatgatggttctgttgactgttcagtttgctntatgtgcttaggggcatatgatgcctctgttacttttctc

SEQ ID NO: 3952 - DNA, 338 bp, Lilium asiatic
ttcaggcccacatcgaatggttcaaccttttaaagctcgtacttatctggcaccaaatggtgacggaacgtctttatctaggagcaatttcagtagcgcatgactaagtgcaccatccaattcagatcgaattcgtaatgatattacagactatacatgtcttgttcgtaagcataacagtagtgatcttcacaactatccgagcttacatcgtcgtatgccatgatacttgcttctcagatgacaagtgactattacatgatgtataactctcactagaacatacgatgactgtaatgcacagagaactcagcgattgcagaaggaatgcgaccttg

SEQ ID NO: 3953 - DNA, 410 bp, Lilium asiatic
cacaaatggttcaatttgactcgagtcctactaaaaggtctccctaatacacttgttattggctttatttgacccgccatgtggccgagaaataattaagtcaaggtttaaggagatagcgaatgaatgtaaaacgatcactggaaccgaagctaccctttttcctttaagagagttgcgacctttgtatcaaattattatgaatttatatgccagtcctagaaaagtagataaatcttgtatcaaggtaagaaaacaagcggttcaccccttttattgaccaaggatggggcaactaaatagtgatcaatgtctaacataactcctaactctaataaaaaaggaatcaaagttgaagaagaccgcaacttagtgtaattcgactctcaacacctaatgttccaatattc

SEQ ID NO: 3954 - DNA, 439 bp, Lilium asiatic
accgcccaagagtagtttcatatcttattcagcagctaaagctttgcccatcagacttttgtaaggatataggtgcactatgtccagttgcacatgttttggccttgattcttagtcaagacggcagtactcgagaaatcgctgcagagaatggtgttgtttctgctgcactggacatcctggtgaacttgagggttaggtatgaatcaataaacgaggctttagtaacaaaatctgtaagtgcattattgcttctactggacgatatgttgcagtcaaaacccaagtttcatactgaagatgttgaaagatcttccaaatccttctccgatccagtggaagtggatgtttctttggcactttcttcacctgcaactgataaaaagcctgcagcagatggcgttcagaaagtatctgacaatgtgtttgagaggatctt

SEQ ID NO: 3955 - DNA, 229 bp, Lilium asiatic
gaccgacgcgtgcgtccacgcgtccggagacgagtctcttggctttttactttagtaatgtaaaaagcaacttgagatttcgttcaattttaactggtcttgttgattcgatcttaatttctctgagtataaatctctaagaattttcttttcagtgaaagttactcttctgactcttggtatgtaatagaagtcctgttaaaaggaactagacacttctttctatttt

SEQ ID NO: 3956 - DNA, 437 bp, Lilium asiatic
aaacttttggggacattgttattgattatccatatgttgaatgcacttcagcagctattcaggcattgacatcatttaagaagttacatcctggacatcgcaaagaagagatagaaacttgcatcagaaaagctgcttctttcattgagagcatacaaacgcctgatggttcctggtatggatcttgggctgtatgcttcacctacggcatatggtttggggtcaagggactgctaactgccgggagaacctatcagagtagctctgccgtccgtaaagcatgcaattttctattgtcaaaacaactaccttctggtggttggggagaaagctatctttcatgtcaaaataaggtttacacaaatcttgaaggaaaccgttctcatgctgtgaacactggatgggcgatgctaactctaattgatgctgggcaggct

SEQ ID NO: 3957 - DNA, 401 bp, Lilium asiatic
tcgccggatccaaggccaagaagggcgccggaggccgcaagggcagcggctcaagggcgaagtcggtgactcgctcagtcaaggcggggctccagttccccgtcggaaggatcggccgctacctcaagaagggccgctatgcccagcgcgtcggatctggagctccggtctacctcgctgccgtgctggagtatctcgctgctgaggttttggaattggctggaaatgcagcccgggacaacaagaagaaccggattgttcctcgacatgtgtgtctggcggtgaggaatgatgaggagcttgggaggttgttgggtggggttactattgctcatggtggagttttacccagcatcaaccctgtccttctgccgaagaagactgggaagggaggggtggag

SEQ ID NO: 3958 - DNA, 391 bp, Lilium asiatic
ctcaggccgacatccaatgcgacatcctctgtcaactggtacttgtctgtccaaaactggtggcggaatggctctatctaggacctactgaaccagctcaacaataatttcttctgccacaccatctatatctcgagatgctagcacatactatacatctctgattatagagttaaactgtatttctctacacaactatcccatcttataccgtcgtatgctaagatacttgatacacagacttcaagtgacctatacatgctatttaacactatctagaacatcgatgactgtactatacagagaaccgagcaattgcagaaggaatgcgaccttggacgctgctgtccatgcctaaaagtctgttatcaaggctggggatgcttttggt

SEQ ID NO: 3959 - DNA, 412 bp, Lilium asiatic
gtgcgactccagcgaggctactctgtacttccttcagaaaatgacgacttcaaggcgccttgcagacatgtaaacagcaaaattccagaagaacattacaaagagggggtctgttcctgagacatctgctaagaaaggaaatgactatcctgttggtccaatcctgcttggattcttcgtctttgtggtcattgggtcatctctgtttcagatcatcatgacagccacaagcggggggatggcctgaatacaaatgatagtgggactctcaaggctctggcagtacgaatttacgttacaatgttaacctgaatattatagatattatgctaagaaacttggttgtgtcggtgtactctttttaccttatagacttggttcgaatgaaattaatggcgcccccttatggtcc

SEQ ID NO: 3960 - DNA, 255 bp, Lilium asiatic
ctgacactcgcactcacttgctaatgagggtttcatgatcattccaagtatcatgacaagcagcgataatcgtgaactcaacgatgatcatcgctatgttattcaccagcctactctgagaggctaaatcagattctgcagaaggtccaaatcaaaatacttgttccatgagcactcataattgatatatattctgtcagccgatcttaatcatatatagattattcaggtggtgatatcctgacaaatcatgta

SEQ ID NO: 3961 - DNA, 447 bp, Lilium asiatic
ccacgcgtccggctgctgacatattcgttcaataatcctcctgtacctgcattattggatgtgtcgtctatttctgtagaccgcattctcttgcttgatgcatatttcagtgtggttatctttcatggtacaacaatcgctcagtggcggaattatggttaccaaaatgatccaaagcatgaggtttttgctcagctattgcaagctccacaggaagacgcgcaaacactcattagatgtaggttccccgtccccagactagttgtttgcgatcaacatggttctcaggcaaggtttctgttagccaagttgaacccatcggctacatataattctgcagagatacctcaaggctcggatattatcttcactgactatgtcagcttgcaagtattcatggagcatcttcagaggcttgccgttcagtcatgattggcatcgtaatta

SEQ ID NO: 3962 - DNA, 446 bp, Lilium asiatic
aaaaaaaggccgatatagcccaaaaaaaagtttctgaatcaaacagactacacaagctactaatgctaaagtgccaagctactaaagaagaaaaaaaagactaaaaatgcataacaaagacaacaagaaatcccggatcatcccgaggcatgtgtgtctggccgtcagaaacgacgaggagctgagcaaactgcttgctggggtcacaatctcttatggcggtgtcatccccaacatcaaccctgtcttgcttcccaagaagaacgctgataaagcctaagctgctggaactaagtcccccaagaagcctgccaagtctccgaagaaagctgtcaagtcaactaaagggcgttaatttgattctaatatatgtctcaagggtttttttcttgtaaaccctaagtgatgtgtccgttgttcctgctttctttgaattggatctaaag

SEQ ID NO: 3963 - DNA, 444 bp, Lilium asiatic
ctttactctggtggaggggaacccttatcctctggatatgagaggggagcttgatgatactgctgctttcaagaacttcaagaagtggggtgagcttgagtttccattgccttttggcagagtcatgagtgcttcagaaaccttcgtccatggacttgatgagaagactagtgcttctttgaaattcacagttttgaatccagaaggtcgtatttggaccatggtggctggaggaggtgctagtgtcatttatgcagatacagtcggggatctgggctatgcttctgaactggggaattatgcagaatacagtggagcaccgaaagaaggtgaagtgttgcagtatgcaagagttcttattgattgtgcaactgcaaatcctgatggccgcaaacgcgcccttctagttggtggaaggattgccaactttactgatgttgctgc

SEQ ID NO: 3964 - DNA, 449 bp, Lilium asiatic
tcgggaaatccgtccactgctccgcccgcgcagctccggcgatggcgacctcctgcgctggtctctccctcgtctccggtgggcttggattcgatagatgcaagattcggtcgaatgagctgaagacggtggggaattgtcagtctcagctggcagttcgccagagtccggctcaagcgaatcgccgtcggaacttgtctgtccgcgctgagtacggtgatggttctaggagtgggggtggtgatttcattgccggttttcttttaggaggagcagtcttcggggcattggcctatgcttttgctccacaaatcaggagatcgatactgaacgaagatgagtacgggttccgaaaggccaagaggccagtatactatgatgatggcctagagaggactcgccagacgctgaatgacaagataagccagctgaactctgcaatcgacaat

SEQ ID NO: 3965 - DNA, 389 bp, Lilium asiatic
atcatcaccgtcaccgagcgcgagagagaagctagcagcatccatgccgtgcctcaacctgtggaccaacgggcccctcgacgatgtcgacacgtccgccatcctttccgaggccagcaagaccgtcgccaagctcatcggcaagcccgaagcctatgtgatggtagtgctcaaaggatcggtaccaatgtcgtttggagggactgagcagccaactgcgtacggcgaactggtttccataggagggctgaatcctgatgtgaacaagaaactgagtgccgcaattgcttcaattctggaggccaagttgaacattcccaagtcgcgcttttttctcaagttctacgatacaaagggttcaaacttcgggtggaatggatctactttct

SEQ ID NO: 3966 - DNA, 431 bp, Lilium asiatic
cccacggggccgtcggaggcggcctcgtcgtcacgctcgtcctcgtccggccgcaactcggggcggtgggtctttatcaaggaactactgtaccggagcaagagtgagggcagcagcaagaccagcgcgaaggaaaagttctggcactcgctctcgaccacggcttcgaaagataaactgaagtccacagcggcgggtgcggagctgaagcagaagaaggcggaatcggcagcggcgaggccgacgaatgggctgggtaagcggcggtcggcgaccccgtcggcgcatgagcggcactatacggagaaccgagcagtggcggaagagatgcgacggcggacgtttctgccgtaccggcaagggctgctcggtagcctggggtgcctcgggttcaactcacggggttacggcgcggttaatggatttgcgcg

SEQ ID NO: 3967 - DNA, 405 bp, Lilium asiatic
ctagaaataaaaataactgaaattgaaagcgagatattaagtaaaaatgagaaattatccaactaaaatgagaaatgaaaatgaagcaataatatagaaatggagaaaaaccagaaaaaacacatatgaaattaaaatcaatattgaaattgaaattgatattgatattgaaataaagaaggaaagaaaattatattccaaactttgaaataatacatgtcaaagaaaatggacggagaatcagaaagagatgaatatcgtaggcgaactctcttccctctttctctgtcatatcctcgacattcgtctattctacattctctctattctactctcttctctttcttctcttttctcttctttctttctcttattttccttactttcacttctactggcttcgtc

SEQ ID NO: 3968 - DNA, 282 bp, Lilium asiatic
tcgcggacgcgtgggctccgctgctcctagggtttcatctgcactcgaggaaacatgctggtctgccaagatctgatctccaatgatgagctcctctctgattcatttccctacactgagattgaaaatggtatgctgtgggaggtggaagggaagtgggttgtccaaggagccctcaatgtagatattggtgcatacccctcagctgaaggtggtgaagatgatgaaggggttgatgacctggccgtaaaggtggttgatattgttgacacctttcggctt

SEQ ID NO: 3969 - DNA, 297 bp, Lilium asiatic
tcgcggacgcgtgggtgttggtgtctcagccgttctgcttgtcggtcagaaggtgtatgccagggggaatgcttttggtctggaccatacccttactaccggcgttatcagtggtctgcgtagagaaatcagttctgctgccacggggcgtcctatacaagatgttatacagactgatgcagcaattaaccccggaaatagcggtggacctctacttgatagttccggaagtttgattgtgatttacacatgtatttactatgcattcgtagcgttctttggcgttggattttcgat

SEQ ID NO: 3970 - DNA, 441 bp, Lilium asiatic
caggaagggccgctatgcccagcgggttggcactggagctcctgtctaccttgctgctgtggtcgagtaccttgctgctgaggtgttggagttggctgggaatgctgccaaggacaacaagaagtcccggatcatcccgaggcatgtgtgtctggccgtcagaaacgacgaggagctgagcaaactgcttgctggggtcacaatctcttatggtggtgtcatccccaacatcaaccctgtcttgcttcccaagaagaacgctgagaaggccgaagctgctggaactaagtcccccaagaagcctgccaagtctccgaagaaagctgccaagtcaactaaagggcgttaatttgatgctaatatatgtctcaagggtttttttccttgaaacccgaagtgttgtgtccgtggttctgccttctttgaattggatctaaagat

SEQ ID NO: 3971 - DNA, 350 bp, Lilium asiatic
gtgactcatgagctaccttactattaaagtttcatattcactcaaaataaacaatgcgttccggccaaaatcataaatgacaatgaagcactccatatataaatcaataacatacactaaaatacacatatgaaatgctaatcaatatcgaaattgaaattgatattcatatagccataaatatagatataaaatcatatcccaaactctgaaataatacatgacaaagaaaatgtacatgacatcaccaagaaagtaatatctaatgctaacatctttcccttttactatcacatattcctcaccttcaactattctacattctacatattctactatcttatgtttct

SEQ ID NO: 3972 - DNA, 279 bp, Lilium asiatic
ctaacttatgagggattgaatcaaaaaaaattaaaaaaaaaaaaaaaaaaaaaaaaaaaaaaagaaaaaaaagagaaaaaaaaaaaaaaaaaaaaaaaaaaaaaaaaaaaaaaaaaaaaataaaaaaaaaaatataaaaaaaaaaaactaacattaattacatatcaaaagccattgtatgaattcccgaaaagtcatacattgataaggcatatcttcatctcaatatgagaaaacctgacgatctcaaatttgatttgaatagccttcttgtaactc

SEQ ID NO: 3973 - DNA, 365 bp, Lilium asiatic
atctacactcttgacgtgtaggacctctacatgttcttctttgtcatgtttggtgagaggggcctttgctcgagttaccatgacgcgcactggtgggagactggcatcgatgagtcgaggttcggatccgaattcagagaggggagtgaaggagactgcggttgctttgttgccccaggtgttgatgtcggtgttgcttgggagtttgccggcccataatagaggcacctgctcgtatgtgtatcccaactttgaagagttgagagcgtcaccaacctgtaaattttcatgggcgttagatatgagaaatagacagagataaatacattacttgtctaacaaaagataaaaaaaaaagggcgggc

SEQ ID NO: 3974 - DNA, 204 bp, Lilium asiatic
cccacgcgtccgcagagaccagatgtgttagtgagtctatgttacatctttatagtcatgtggatagagatctgcgacagtgcagggaactcatcttctgtgtgataatagatggtggggagtgctggatcatctatatatatgtttatatcctgcttaggattattgaaatgttatggcagtatgcagattgttactgtgttt

SEQ ID NO: 3975 - DNA, 284 bp, Lilium asiatic
gctagcttacgagctcgcggaggtatatgctaggctcttgagatgtgaagaggagcagcggacggacacactcatgcaactgatggagtatctgatccctgtgactgagagcaagaagccaccgcgttttctacaaaggaccatgtgctgacaccgttacgtatcgcgagttcatatagaggaaaatcatgctatctcatctatcagacgatcgaacgattaatgcaaatacagatcgatgtatcatacaatgctacccgctgtatgacggatgagcacgtcga

SEQ ID NO: 3976 - DNA, 141 bp, Lilium asiatic
tccacgcgtccgtaaaaccttgtgagatgggtgagggggtggaaaagagtaaaaactggaaagggagggtttagatgcaagagagacagaaaggttgtgctctctcgtagttcgaataaaaggtcttttgggcttttcttt

SEQ ID NO: 3977 - DNA, 404 bp, Lilium asiatic
cccacgcgtccgtgatgggattgctggactatatcgtggctttaacatctcatgtgttggaattatcgtgtatcgaggtttgtacttcggaatgtacgactcactgaagccagtcttgctaactggagacctccaggatagtttctttgctagctttgcgcttggttggcttatcacaaatggtgctggacttgcatcctatccgatcgacactgtccgcagaaggatgatgatgacatccggtgaagctgtgaagtacaagagctcctttgatgctttcaaccagatcttgaagaatgagggagcgaagtccctgttcaagggtgcatgtgcgaacatacttcgtgcagttgctggtgctggtgtgctggccggttacgacaagctgcagctgattgttttgg

SEQ ID NO: 3978 - DNA, 460 bp, Lilium asiatic
tcggcggcgcccttttttttttttttttttttttttttttaaattcaaacacccgccatgttgaggcggtaaaataaacttagaaatgtttggatctcccatttaatttattcgcaagtcgtacaaaaatacaaaaaacgctcaagaaaggaagagaactcaatttagttcacaatgaaggtaacaagaaccactggtcctagcccacaacatgaacatgaccgactactacaaagacgacttcaagtttagatagctgcaaaatattccttgctgagcttcgggtctggcttcattgacttcttccccggcttccatcctgctgggcaaacctcatcagggttgtcctgcacatactgcaaagcctgaagagttctcatggtctcatcaacactcctgccaatagcaagattgttaatggtagagtgctggataacaccttccttgtcgatgatgaaaa

SEQ ID NO: 3979 - DNA, 304 bp, Lilium asiatic
ggaatgcaccatcagaactattgaaactatgacaatggtgtttttaaccgcaagggaatattgagcttgctatgaaggctagtaggacatcattcatagccaccgacaccggaagggtttcaggagtagacatgtcggcatgggaagctctcacatcgcaggtatctgctgcaatccgtgaattcaaacgcgtctctgtcataccagctgcaaatttatatgccgaagaggttcaatggcaagtcgccgaagctagtgcagctattcgaagaagctgcaaaaattaccagcgggaatatttcgc

SEQ ID NO: 3980 - DNA, 406 bp, Lilium asiatic
acgggtgtcggagttgtctgggatatgccgccttgacaacacgaagttccggatgattccgaggcatgtgtgtctggccgtcagaaacgacgtggagctgagcaaactgcttgctggagtcacaatatcttatcgtggcgtcattcactacatttaccctgcattgctttccaagaagaacgctgtaaaggccgaagctgctggaactaacgcccttcaagacgcctgccaagtctgcaaaggaagctggcacagtcactgtagggcgtcaatttgatgctaatatatggctcatgggctcatttcgtagagacccctagcgatgtgtctatggctctgttttctttgtatcggatctaaatatcttgtggaactatgctgcataacacgtcaagctctaaatcgg

SEQ ID NO: 3981 - DNA, 253 bp, Lilium asiatic
cggactcgtggcaacactcttgcaggccatggtgggtatgttaacactgtggctgctagtgctgatggttcgttgtgcgctagccggggcaaggatggtgtgacactgctgtgggatttggcggaagggaagcggctgtattcccttgatgctggagctatgattcacgctctttgcttcagccccaaccgctattggctgagtgctgctactcaagatagtattaagatctgggatctcgagagcaagtcta

SEQ ID NO: 3982 - DNA, 383 bp, Lilium asiatic
cccacgcgtccgcggacgcgtgggctctgcatcaaggttgaaaatggcaatcgaatccgtggcgtccaagttcctgcgcccccgcaagatccctcagtcgacggacatcgccgccgccgccacatggggcatcgccgccggcaccgtcgccctctggctcatccagccttttgattggattaagaagcagtttttggagaagccccagccagaagcgtagcgatctcggagtttgtcaaagattttgctctgtttggtttcagtaataacatgtgttactttgtttctccttaacaggagacgaaccatttgaatgttgcttagtagattgttgaatgtggtccttttaaattaggaaagtgacacgatattttctgattgat

SEQ ID NO: 3983 - DNA, 367 bp, Lilium asiatic
ccaagcgttcggttgcgcaagaaatgggcttgaccggatgatgagttccactcgatgcttggagttgtccgtgaacttccggaacagcttggcctttcggacaacattctggcagacaaaaccccgaagctcttttactgaattgggttctagatggccttaaggttggttaaggatgcttaaagagggtggtgacctttgctttttttcttttacccttcaataatttttgggttgagctatggtttcacctggtactggcgggttcttggggtcctggtcaatttggatttgaaatccagtactggttctgagacattggttaggggtatatattaatggggcaaaatctaatttaattgatggc

SEQ ID NO: 3984 - DNA, 296 bp, Lilium asiatic
tcggacgctttgcaagggctctataagatgttcaaaaacaagaaactgttcagaaagctttgtaagaattatcaggctttcttagcatcagatgccatcattaagcacattcctcgacttttgggccctggtcttaacaaggcatgaaagtttcctactttggttactcaccaggaatcattggatgcaaaagtgaatgagaccaatgcaatggttaagattcaactgaagaaagtgctgtgcatatgtgatgctgttggaaactgctctatgaatgaaaagcaaattttccacaa

SEQ ID NO: 3985 - DNA, 338 bp, Lilium asiatic
acgcccacgcgtccgctgacgcgtgtgtgggagttttgcgtggattatgtcaaagtgattcactgatttcacctctttgaggaaatttgggggaacttaatgaaaacttggattttgcttcaaatttaactgatcttcgacttcaaattattactgcacttgactacatgttcgccaggttcacataatatgatattaagtctgagataatctaagggtttggagttggctctcattacatgatgattatctcacggtcttgaataattcatttaccatttcatgatatgtttctacgatgtattattaaaaatccatcgtcaattttggtgaattaa

SEQ ID NO: 3986 - DNA, 459 bp, Lilium asiatic
cggacgcgtgggaagggcttaagaagatgttcaaaaacacgaaactggtcaagaagcttggtaagaagtatcatgctttcttagcatcagaggccatcattaagcagattcctcgacttttgggccctggtcttaacaaggcaggaaagtttcctactttggttactcaccaggaatcattggaggcaaaagtgaatgagaccaaggcaatggtgaagtttcaactgaagaaggtgctgtgcatgggtgttgctgttggaaactgcgggatggaggagaagcagattttccagaatgtgcaactcagcgtcaacttcctagtctctatgctgaagaagaattggcaaaacgttaggtgcttgtatctgaagagctctatggggaagccaactcgcatcttttgagctgtcctagtaggattccttggtttgcagcaacattttgtgggagaacttactt

SEQ ID NO: 3987 - DNA, 269 bp, Lilium asiatic
cgaccgacgcgttctagctgtagttgcacgtcagcttctgcctcatttcggaggtgacggcagtcgggcagatgaggatctatcactgcgatgacgtctcaaagcacaactctactaagcattgctggctcatcatctcctgcaaggtctatgacgtcaccccatttatggaggaccatcctgctggagatgacgtcttgctacgcctcaaccatgtacaagcatgctacaagacgattttccaagacgctgggcatagcacatctgct

SEQ ID NO: 3988 - DNA, 449 bp, Lilium asiatic
  modified_base (418)..(418): a, c, g, t, unknown, or other
ctttcttcatcctccaccattttttccaccttccaacaactccacaaccaccttcaccctccaacaccggcaaaagcttcatcaaggtacatctatctactctcttgtcccctttatgtcttatttggattgttatgtgtaggattttggaaaagctcggatttgtgtggcaaaatgaggaaaggatcaaagctcaagaaggaaaagagatgttgcaagcttgatgaggatgtgctctcggatctataagtacccctcctcccccatcggaaaaaaaagaggtctcactccggcccaagtgggggagggcacattgttggccgtctttctctcgttttggaggaggcacattgggagaacatctacaagtgattttggagtggagagttcatcatggttcttggttatgggtctttgntgagctttgagagagtcatgtaagtggaatt

SEQ ID NO: 3989 - DNA, 212 bp, Lilium asiatic
tcgtccactcgttcgctcgaagtcttataccactttggcattttacaaatctttagaaattgatgtttacagacccaaaatgtcttcattatacaacttaagtctgaactgtatatggttaacattgttctttgttttgtatcgtgaaatgtgagccatattttcataacctccacattggtgagcatttcaactagtaaattaatcatcat

SEQ ID NO: 3990 - DNA, 443 bp, Lilium asiatic
gggtgatactccattctgcagtgaggagtgccgggcgttgcagatagagatggatgaggcgaaggagaggaaggagacaacgacaatgaagcaaagatcgagccctaagaaggccgagaagatccatgttagggctgcagctggcaccgttgtcaccgggtaaccatgtatagctaatagctcttttaccttatatgatagaatgaaaataaagcaagaaaatcaagaatgagactgaggaagtaaggatcttttacctgaaagagggaggtggtaggattgttggtttgttcctaagagctcgactgacaggcggtgatgcctgtgagctgcaaggtggtggtagagtaggtggttctctctgtaattttgtagtatcagagattcagaaggcttcttgcttgagtttcctttaccttttcttatatatgggttcaactttt

SEQ ID NO: 3991 - DNA, 452 bp, Lilium asiatic
cttcgtccgggaaggcttgataggaaaattgaattccccttgcctgatagacggcagaagaggctcgggtttcaggtctgtactgccaagatgaatctaagcgacgaagttgatctggaagactacgtctctcgacctgacaaaattagtgcagcggagatttctgccatatgtcaagaagcagggatgcatgctgtgaggaagaaccgatatgtgatccttccaaaggacttcgagaaaggatacagaacaaatgtgaagaagccggatactgacttcgacttctacaagtgacgagtctgcttgtggaaatttcactcttagtgtatgtcaaggctatttatttcaggagacagttataaactttgcttaggataactcatgtatctttattttgtctgtgttggcactaacacattgttcagctctaacgaatgtgaatgttatctggt

SEQ ID NO: 3992 - DNA, 339 bp, Lilium asiatic
taacattgctataacaagagtttataaaaccttatggacaacctaatattcttgcggaatagatagctttacaatgaaaaaatagagtttcatttcgaaaagcaatgaaaaaagctattgaattaactgaacaaacggatataaaaggaattcaagtacaaattgcctgtcgtatcgactgaaaagaaattgcacgtgtcgaatggattagagagggtagggttcctctacaaacaattcgtgctaaaattgattattgttcctatactactcgtactatctatggagtattaggcataaaaatttggatatttgtagactagatataatggtccttta

SEQ ID NO: 3993 - DNA, 459 bp, Lilium asiatic
ggttaactcctttttatagtacggcagatgtggtcaagaaattaaaagagtacgtagatgagataaatgccaatatagagaagctagatacaagaggaccggtatcaaaatatgttcttcctgacgaaaacttaaggggaaggctaacaatcagttttgatgaggatatgaagtctggagttgcttgtagtcttgaatcccgaggctttaaaattctgtgcaaagcaactgagcaagtggttggctatgtaaagccctattctatcacaggaagtctgccactaatccgagaattacaggatgatggctttgatgttcaaactagtggatatggtataatggcgacatatcacgcgaagaatgagtattgtctgttctccgacatggctcaaggcttccaagtgtttgtgagcattatctctcaattggaagaagatcagggataatgattgcctctat

SEQ ID NO: 3994 - DNA, 177 bp, Lilium asiatic
ggagatcggaagagcaagtgatctcttcagaatttgcggcattgaccgatagaggtgtcggtatctgacattgaaaatttgcttatttggcctcttcctaatatacattaccaatttggaaaaatattgacattactaaacataaaaatgttctttaatcaccatctttgttgttct

SEQ ID NO: 3995 - DNA, 379 bp, Lilium asiatic
  modified_base (49)..(49): a, c, g, t, unknown, or other
agcttttgttgggggtcagctgctgccttatatcggaggtgatggcggnggagcagaagacgatctatcacttcgatgaggtctcaaagcacaacgctactaaggattgctggctcatcatctccggcaaggtgtatgatgtcaccccatttatggaggaccatcctggtggtgatgaggtcttgctagccgcaacaggtaaggatgctacagacgatttcgaagacgtggggcatagcacatctgctagggagatgatggacaagtactacattggcgaggttgatgtgtcgagtgttcctacaaagcgtgcttacgttccaccccagcaggcaccgtacaatcctgataaaacttccgacttcgtgatcaagatact

SEQ ID NO: 3996 - DNA, 318 bp, Lilium asiatic
gcgggtactgatgaccgttacattgtggtttcgactggctcaacccatctcttccaagcagcgctttatgcactgtctacggccaatgagactaagccgatgagtgtggaatctgcagtaccgtactactcgctttcgcgttgctaaaatgtgacataaatggacttgaagatttcaagacttttctaatgagccataagatccttactcagagtggaaagcatttcatggtacaggcaacattcgtgagggtcaccatgcttgatcgtgatgaaacttttgatctttttactgaaagattatcattcatctcatgaa

SEQ ID NO: 3997 - DNA, 376 bp, Lilium asiatic
tggacgtccagcaaagactgttgccaagtcgtaggctgttggacgtccagcaaagactgctgccaagtcgaaggcttctgcagcgaagccgaaggctgttggacgtccagcaaagactgctgccaagtcgaaggcttctgcagcgaagccgaaagctgttggacgtccagcaaaggcagctaagacatctgccaaagctgctcctgggaagaagcctaaaactgcgaagaaggctgcagcagtgaagacagccaagtagtagctattttctttccttttcttgtctctgttcaaggagtggtaggcagctgtaaattgtcatcagcttggatattagtgcgttgtgtggtttttagtaatggcaaagtgttgatga

SEQ ID NO: 3998 - DNA, 456 bp, Lilium asiatic
  modified_base (371)..(371): a, c, g, t, unknown, or other
  modified_base (410)..(410): a, c, g, t, unknown, or other
  modified_base (422)..(422): a, c, g, t, unknown, or other
attctccttaacaaattcctatacaaagaagaaaaagcagagatgcaagtgggaattaacagtccgaggcatgattcccagttatagaacaaattttggaaacatagggcccttatgcatccatgttgtatgcctcaactccacaatagcccctaagtattcttcttaacaaattcctaggagttgtgctttccgtttaatgtcctgtgttttctttttccaaggataccaaacaataacatgaggagcagcgaaccagaaccgaagcccattttaagtttctccatggcagagatcttggatatgttttgcaaaatcacacccaaccagaagatcgtctagagtttccacatgactgtcaccaaggatantttggttgaactaatgggtctcagttttgtgaatacgtncttatataaatntccaagataaaatacacactctggtaaggatatg

SEQ ID NO: 3999 - DNA, 448 bp, Lilium asiatic
gagaaatgatgtgaagcaggggagggcagatgagtctctctgattaccactgctgatgaaacataaggttaacttcccattagaaagcatcaaagatggcagtttcaagggaaattaaattgagagttcaggcatccggaaacctgcaaaactcaccgaaaaacattaaacacaatcccttgttcaagttctctacatggaaatgcaagcaatgtgccctcagttttaaagatcggtcacacaacacttctgctggtgcatggtttctcggatggggaactcactatgattttgtgaagttgcaggtcgtaacaggtttttttttccatccaaacttccttacttttccgcattcatctggttcaggtcatcatggaaaaacacttcttatttttattattaataataagcttcttgtgaggagacatcttctgtgtcgtaaatattc

SEQ ID NO: 4000 - DNA, 387 bp, Lilium asiatic
  modified_base (330)..(330): a, c, g, t, unknown, or other
tcgcggacgcgtgggtccgaatattaacagcaatgggagtatttgcctcgacatcttgaaggagcaatggagccctgccttgaccatatccaaggtgttgctctcgatatgttcactgctgacggacccgaacccagacgaccctttggttcctgagattgcacacatgtacaagactgataagaccaagtatgagactaccgctaggagctggacccagaaatatgcaatgggttagcagtgtcgcaatgtcattaaatttgatgttcgcccttttgtatgtaagaatgaaatagtccgtccaaaagaccaggaccgaaactggacctncgtcgctccaaagattctgacattgatgtcgattgtttgcgtgagaatttcatattt

SEQ ID NO: 4001 - DNA, 384 bp, Lilium asiatic
aaaggaagtctcacacgagtgggaattggtttacaaacagaagcccatctggatgaggaaacctgaggagatctcgaaggaagagtatgctgctttctacaagagcctcaccaatgattgggaggagcacttggctgtgaagcacttctcggttgaaggccagctcgagtttaaggcagttctctttgtgccgaagagagctccatttgatctttttgataccaagaaaaagcctaataacatcaagctttatgtccgccgtgtcttcatcatggacaactgtgaagaattgatcccggaataccttatctttgtcaagggtattgtagattctgaggtacctcctctcaacatttccagggagacgcttcatcagaacaagat

SEQ ID NO: 4002 - DNA, 342 bp, Lilium asiatic
tgctgctccggctaagaaggctttagcccctccaccggctaagaaagcattagccccacgagcggctaagaaggctgtgcccgtgaagaaggctgctcctgcagcgaagaagaaggcggcgactccagcgaaggggaagtccccggcgagaaaggcgcctgcaaggaaggcggccaagaagtaggcttttgattcgtgattccgatggcagctggctgtaaattggctgatgtttgagggggcatgtgcgtcgttggcatgcgaagtaggttttcctgttgggtttttaggttaaaaaaataacatataaatataaaaaaaaaaaaaaaagagattaatcat

SEQ ID NO: 4003 - DNA, 374 bp, Lilium asiatic
cggactcgtggtcggacccttgtccaaatccgatgcttaatagtcctggtatggttcatgtgggtccagctgtcctcggctctaatctaaagtattttccctgggtttgcttgggcaattctttgccggaatctgaccttcttaatatggtttgcaaattcctctgtgagattattcatatggtaatattaggttgtacccttaattttgagatactttaggtaattcctccttgacatgcctgttaactttgtaatccgtaaatgtagggcactttgtggttggattttcatctgttacaaattttcggttaaacttcaaaccaatatttcattgctaactttgcctgggttaaaaaaaaaaaaaaagggcgg

SEQ ID NO: 4004 - DNA, 414 bp, Lilium asiatic
gaagaataggactgattttgggctcagaagctcggctgctattatggcctgtgtctcagcgaggagtgctgccttcatcaatgacgtgtcctctgcttccattaccactggcagccggagatcaatgcccggcggcatggtccctgtgaagcctgtcgtggccttgtccagtgagcgaagagactcttatggttctctggtattgcaggcggctcaactgttgggacccccaacaagatttgaagcttcaaagttgaaggtgattttcatgggagatgaattggagaaaccgcctatgtttacccttccaagagcttacactctgacacattgtgacttcacggccatattaaccttagccatcttcaacagttcctacattgacaagcttagggtgtggcaaaccacattaca

SEQ ID NO: 4005 - DNA, 398 bp, Lilium asiatic
gcgtttgttaaggggtatttctggtgtggtcgagctgaagatgcgtataattatgttgtggatatgagtatgaaggataagtgctcggcgaataacaattatagcttgcttgctagtcttttcctaagatcgggtagggtgttggacgcaggaaggattcttcatgagatgatggagaagggccttcggccgaactttcctgtttatataaagattgcgaaggatttatacaagattaaaaggggagatttgtctttggaactgaaatccatgttttccaagtttaaataaatttcaaatgcttgatgtttcttctcacttggatgttgggatatccatcatgtaatgatggagaagccttgcaatcaaactctcgttataccgacaaggattcaacc

SEQ ID NO: 4006 - DNA, 376 bp, Lilium asiatic
cccactcgttcggtttccctgacatgagctttccattagttttagatgactgacgggtttggggtgtctttttagttttggcgtggaccatttggattagtttttctgtttcagtatttgctctcttttcttgtggcagtatgtataaattatcccttgtttgtaagactcgtgtggactagagcattgcagcggaggggattaaatagcgtggaagaggcaaaaatcaaaaaaaaaaaaaaaaaaaaaaaaaaaaaaaaaaaaaaaaaaaaaaaaaaataaataaaaaaaaaataaaaaaatataatagtaataataataaaaaacaataaattttaatttaattaataaaaaaaaaaggggcggcccttttaaa

SEQ ID NO: 4007 - DNA, 441 bp, Lilium asiatic
  modified_base (293)..(293): a, c, g, t, unknown, or other
cgagaatcagaaaatctccggcctcccccctcctctcccagtcccagatcccggtcttccaggcagatccaatggattggcaaggacagaagctggccgagacgctgatggagatccttctggcggtgttcgccgtggcggcgctggcgatcggctactccctcggttccttcgagaagatgatgctgatatacgccggcggggtcgccctcacgacgctgatcaccgtccccaactggccctggttcaaccgccaccacctcaactggctggatcctgctgaggctgaccgncaccccaaaccgcagatgccggtcgtcaccgcccccaagaagaaggggtccaagcaccaccagaagtaggcttacttgatgtcattttcagtcatgttgatcttagatttcaaattgaacaagttgaattgcggtataatattcatag

SEQ ID NO: 4008 - DNA, 288 bp, Lilium asiatic
gcagccgctcgaagaaaacaggaagctagttaggcaatcggcgaaaccctgagatgagggggaagtggaagaagaagcggatgaggaggctgaagaggaagcgccgaaagatgaggcagagatccaagtagatgccgctgcaggactgtaatgcatgcatcgtggcttactgttggattaagttggctcttttattgttaagtttggtgttttaggggactgactatctggttcttttttggttaaattatgaagtttttaattctcaaaaaaaaatattttaatttt

SEQ ID NO: 4009 - DNA, 457 bp, Lilium asiatic
aagaacttcttaaagtcacctgtcaacggcctaatcttcgtgagcgagacattgtgcagactgttggtctgaatgcttaccatgaggacccttatgcacgggaatttggcataaacattagtagtagtcttgcttctgttgatgcacgaattctgcctcctccatggctgaaatatcatgaaagtggccaggagagggactgtttacctagagttgggcagtggaatatgatgaataagagaatggtcaatggtgggacagttaataactggacatgtattaatttcgcgaagaattctaaagttgatgataatgttgctggtcacttctgctattggcttgcaagtatgtgctatacatcgggaatggattatgcggaacaccctgttattcctatactagagagtcaccccagtcaagttgatagagctctaagatcccaccattataatgcaat

SEQ ID NO: 4010 - DNA, 432 bp, Lilium asiatic
tcgcccacgcgtccgcttcaatcaatcccctcaatcatcgtctctcgctctcagcaatggccggacgtggcaaggcggtcggctccgcagcggcgaagaaggcgacctcgaggagcagcaaggccggtctccagttcccggtcggccgtatcgcccgcttcctcaaggccggcaagtacgccgagagggtcggcgccggcgctccggtctatctcgccgccgtcctggagtatctcgcagccgaagttttggagttggctgggaatgcggcgagggataacaagaagactaggattgtaccgaggcatattcagcttgctgcgaggaatgatgaagagctttcgaagttgctggggatggtgactattgctaatggtggggtgatgccgaacattcacaaccttcttctgcccaagaaggctggttcgtcaa

SEQ ID NO: 4011 - DNA, 394 bp, Lilium asiatic
gtgatgcccgacgattcacagcggtgcgtctactcgctgcagagctcactggaagcaagagacatccgactccaaaggcccaactctacatgtgatacagtcctatgcttctgcggaattaggcttcatgagatcgggtcgctgtcgtgcccggcggcgttcaacgtctccatcgcggcgcacaatgcgaccccaacagcggcggtgttggagctcgggaagcactgccggaatgcgtcctactcgggctgcactcgctgtctgcaatcactgcagaagctgaagggcaatggtgatgggaaaatgcacaacgatagggcgagcaagatgtttgggagggattgtcagctgatggggctgacgtggctgctggcgcggaacaagactatgtaca

SEQ ID NO: 4012 - DNA, 457 bp, Lilium asiatic
cgctgcacaccatcttatccgaagcccgccgtctccggcaccggcgccggcgcggctcatctcgaagtgggggcgaagctcgtgcttcagtccaatcaatttctcggctagtgccaagaaccaggaggagggcggcggcggcggcggaaggcgtgtatggcgccgccgtaaattgacgaagaaagacgacaagttgcgatctctggtggagcgggtacctttcctcgaagaacgggtgaggaatataagggactctggcgagatactgagcatggacattgaccgactgatgctgtcacaggagaacaggtttgattttgtcaacgaggtggctgcagaggccacagcttacctcgaaaacaacagggacgaatatggagcgaagaagccgatactgcatgtgattagtaaccgcatgaatgaagctggattctatcgaccggaggcttacatggaa

SEQ ID NO: 4013 - DNA, 451 bp, Lilium asiatic
cggacgcgtgggcggtacagtacgtccgcttcgacaggggcacgccgatggtgctggacaacaactattaccgcaacatccttgacaacaaggggctcttgctggtcgaccaccagctcgcctatgataagcgcactcgcccatatgtgctgaaaatggcgaagagccaggagtacttcttcaaggagttcagcaggggcattaagattctcactgagaataaccccttgaccggtgacaagggagagatcaggctgcagtgcaacgtggctaacaagaggcactagatagtgttggtgctgagaggagtgtgtgtggtggccctcctatggatggggacggtgctgtggatgttgttgctgccgcttttcctttggttttggttcggtgttatcggtgcctagctaggattgtgggtgatgaagatgtattatctatgaaaggaggatgt

SEQ ID NO: 4014 - DNA, 355 bp, Lilium asiatic
cccacgcgttcgctccggtgagcaggccatggaggcggtacatgagtatgaagaccctcggcttcgtcatcaacagcagcttggggtggcggggacgccggagagttgtgctatgtcggtgtacagctgtcagctgccttctgaggttatatgggcgccgtccgccgcgcggtcaccggcgccatcgccgtactgagcagctcttatctgtaatgttatttcttactcgtgcattatctattttactttgtcttctcagttcagttctaaaatagaatctgttagcaggcttttggttttggtgttaaaacaaatattttggattaggaataggtttgcatggatgttaagtttg

SEQ ID NO: 4015 - DNA, 451 bp, Lilium asiatic
cggatatttcggggactattgtagatgcagatccactggcggtgtacgtcattgatacggtgctggagccgagggagctgtttaagccggcgcatgcgccagcaccggcgccggcaccttccccggaagcggatgcgccagtggcggataagggggcggcttcgccgtcagctccaacaccggctggaccgcagtcggaaccggcagataagaaaaagcctgcagatgagaagagtggtgtggctagcaaggcaactgggttgcgtgcggcggcggcggtcattgctgctactgtagtgttgatgacagtttagtttctctcttttgtagagcttccttattttattttgatttcttggttgagctgctggattgattgtgtgagtttgagtccatcttggttttctcctaatgttgattggagaaaataatggtagatctattaatctga

SEQ ID NO: 4016 - DNA, 205 bp, Lilium asiatic
gtcatgcttctgttacgggttgttggatgttgggtgtgttggatctgatgaaggatcttgggaaaattcgtatggagacttggatgaatgctgctagttgtgtaaaatggtgaattctagagtatagttgggtttagagttggtactagaagttgatgtaatctgtggaaaaccatgtgggtaacgatgaatcaattgcatggac

SEQ ID NO: 4017 - DNA, 369 bp, Lilium asiatic
tccagtggttgagccggctcctacagttccggtgccagttaatccggtgactgctatcaagccaagtattccgacaccttcgccatggttgcctattgatccgaatgtgccaccattctcaccgggaacttgctactactggagcacacacccggcggcgatatgggcactcttcggctactttgggactgttggcgagtactttggtacaccatgtatttctgcgtttgggacgaatccaagctttcaggaagcattgcagaacactaggaccgatggcattggagcactctacagagaagggacggcggcgtttctcaactccatggtgtgcaccaagtatgcattcaccccttaacaagtgactag

SEQ ID NO: 4018 - DNA, 334 bp, Lilium asiatic
cgacggactcgtccttccagtgcttgagcctgctattacagaactttttccacttaatccatctacgcctatcagcccaaatattccgacaccttcgccattcactcctattgatcctaatgtgccaccattctcaccaacaacttgctactactatatcacacacttggcgtcaatatgctcactcttcatctactttgagactataggctagtacttatgttcaccatgaatatctgcgtatgctacgaatccaatctttcacgaagcattgcagaacactatgaccgatggcatttgagctctctacaaacatagcacattcacttttcat

SEQ ID NO: 4019 - DNA, 320 bp, Lilium asiatic
  modified_base (280)..(280): a, c, g, t, unknown, or other
tcgtccacgcgttcgattttatacaggatgtagctgctgccagtataattgatgaagaaaatttgctacaaattgctgaaacatgtgggttttttcaaatgttacaactttcgggactcctagacaaatttagtattgaagaatgataatgacggatgacctgtcccgcttcacggacatgaaaacttctttttaaggatgtagctgccgacagtataattggtgaagagaatttgctgcacattgctgaaacaatgggggtcctttcaaatgctacaanctttggtactcctgagcaaatttaagattttacataatat

SEQ ID NO: 4020 - DNA, 345 bp, Lilium asiatic
tcgatttttaccaaaaaaaaaataatttatattgctcgcagttcatcttcaagttcaaaaccatgagacattacatcatatcccacaaagaagtcactgacagaggagggtaagtactatatatagtgtttataggttatatatattagagatacttaaacagttttatctaaggtataactttgttaagatatcatacactcaccacttccttccaccatcaaactgttttcggtggattttgactgcattggtgttgtgactggattgtgggctatgatgtaatgtctgatggttttgaacttgaagatgaactgcggcaatatatattatttaatttttacc

SEQ ID NO: 4021 - DNA, 443 bp, Lilium asiatic
  modified_base (354)..(354): a, c, g, t, unknown, or other
cccacgcgttcgcccacgcgttcgtcctccgtgtgctcaacaccaacgttgatgggaagcagaacatcatgttcgctctcacctccatcaagggtatcggccgccgatttgccaacatcgtctgcaagaaggctgatgttgacatgacaaagagggctggcgagatctcagctgcggagcttgagaatttgatgactattgtggcgaatcctcgtcagttcaagattccggattggtttttgaatagaaagaaggattacaaggatggccgctactcgcaggttgtttctaatgcgttggatatgaagctgagggatgatcttgagcgtctcaagaagataaggaatcaccggngtcttcgtcactactggggccttagagttcgtggtcagcacaccaagaccacttgcaggaggggaaagacctgtggtgtgtcaaagaaa

SEQ ID NO: 4022 - DNA, 306 bp, Lilium asiatic
cccagactcgtcggcggctcgtctcctccttctcaaccgcacaagcatcgccggcaccaagtcctgccgttcatttcatctcccccggaagtttccctctccggctattatccgccgcgccacctggagtccaccctcctgtgccgccactccagttgctatgagctcagcgaagattattgatggtaaggcgacagcgaatcaaataagagaggaaattgctgaggagataatcctgatgaaggaggcgattggtgttgttccggtgctcgcggtggttctagtgggttaaaggaaggattctca

SEQ ID NO: 4023 - DNA, 260 bp, Lilium asiatic
gtccgagaagaagcccaaggctggcaagaatctcccggcctccaaggaaggggcctccgacgaagaagaagaagaggtcgaagaggtcggtggagacctacaagatctacatcttcaaagtgttgaagcaggtccaccctgacatcggaatctccagcaaggccatggggatcatgaacagcttcatcaacgacctcttcgagaagatggcacatgagtccgtccgccttgcccgatacatcaagaagaataccatcacc

SEQ ID NO: 4024 - DNA, 357 bp, Lilium asiatic
tcgcccacgcgtccgaaaaaaaattgtagttcatgttttttaagtagtgaattgactattaactggggctctcttctgcttattttcttactgggaaaataataccaaattatataatctggggcaggccgttaacataatattcccttgatgacagtatcaccgtaacttggaattagttggtacccttgtgacaaaatcacaataaattagcacacattctattggtttgtgggtctaggtctctatataagagaccaatgagagcccttgcaacacactttcatctttatttcccctctcttcttccacctattatttggagtttgttgagagtctcataaatttcttcttcat

SEQ ID NO: 4025 - DNA, 458 bp, Lilium asiatic
tcgcggacgcgtgggctcatccatcgtcgtccccccacaggaacgagccatgtctgacgaggagcaccagttcgagtccaaggccgatgccggtgcatcgaagacctacccccagcaggcgggaacgatccgaaagaatggttacatcgtcatcaagggccgtccctgcaaggtcgtggaggtgtctacctccaaaaccgggaagcatggtcatgcgaagtgccactttgtggccatcgatatcttcacttcaaagaagctggaggatattgtgccttcctcccataattgtgatgtgcctcacgttaaccgtactgactaccagctaattgacatttccgaagatggatttgtgagtttgctgactgaaagtggcggcacaaaagatgatcttaagctcccaactgatgaggctctgctcacccagcttaaagatgggttcgatgagggaaaagatc

SEQ ID NO: 4026 - DNA, 436 bp, Lilium asiatic
gagctcggctctaatggcgattcctccttcagcttccttcagagccaagtcttcccacctgcttcaagctttcttcgatgccaaggcttcccatctcctgagagcgacaaggacgtccacttcctcctctaccttcctcaagaagtttccactgatggcgaccttccaatcttcctccatcgtcaacctccttacctgatggcgactcctccactacggcgagcttacttcatggccaaggaagaagacgagggcgactgcagtgaagacgacatctgaagcattctccaccgtccgatgaagttctagaagacgccagaaagccatccagagccgtccatccttcagagcttcaaatgaagtaagattcaattcgatttggtactaattcttatttctttttatagaagttctgatctataaaagaccgagagat

SEQ ID NO: 4027 - DNA, 421 bp, Lilium asiatic
tcggagagatttgtctggagtatctgagggatttgccggtggaggaggtgaaagctgagctgatgctgtttaagggaatcgggccgaaaacggtagcatgtgtcctaatgttccaacttcagcgagatgatttccccgtggacactcacgttttccgcatcacaaaggccattggttggattcccgcaaaggcagacagggagaaggcatatcttcatctcaataagaggattcctgacgagctcaagtttgatttgaattgccttcttgtaactcatgggaagctctgcccgagatgtgccagtaagggcggtaagcagccgaccgataaagccaaaataggtggtaagcaaactggcgatggcctttctgcatgtcctcttacaagttatagttgcagcgaggacaaacatgataggta

SEQ ID NO: 4028 - DNA, 330 bp, Lilium asiatic
tcggccctggtgtgctgtccatggcgaattctgggaagaacacgaacggatcgcagttctggatctgtactgcgaagactgcgtggctggatgggaagcatgtggtgttcgggcaggtggtggaggggttggatgtcgtgaatgcggcggagaaggtgggatcagccagcggtgcgacctcgaagccggtcgtcattgctgactgctgccagctctgatctggtagtaaagatctcacgctagttatcgtaataataggataagtggtttcgcgtatcttgggatcttatctgttgacctttgtaagggtttgtggtactcttggtgtat

SEQ ID NO: 4029 - DNA, 368 bp, Lilium asiatic
cccacgcgtccgcggacgcgtgggcttggtagtcacatccacattccgaaacttccaaagtggaagaaagataagaagaagaaaagcagtaaaaccggaccaatcttaccctacttcaacagcacgaggggctacaaccttgttgataataaggaggatcttggcaccaaggtgacaagcatttttcagaatcctatgatccacgatgcatttacgggcatgggcgagtaccgcaacctagtggtcccagatgggaaattcgggctcggattcaggaggttcgaatcgagctctggccagatgacgagtttcgggcattctggaattggtgggtcaacaagcttctgtgatgtcgagcacaaatttgc

SEQ ID NO: 4030 - DNA, 313 bp, Lilium asiatic
cgagaacgccgtgctgctgtggacgctggatccggcggagagggatgcccagctggcgagtgaggcggcgaagaagtcgaaccatctggctctgattgagattggctgtgggaggtcggcggcagagttactggctgcgagggctgagtatcatcagcggtttaagaggtctttggaggaggatgtggctgctcatactaagggggattttcgcaagcttcttgtaccacttgtgactgtgtaccgatattaaggggaagaaatcaacacaacattggcaaaatcagaagccaagcttcttcatggaaagatc

SEQ ID NO: 4031 - DNA, 260 bp, Lilium asiatic
tcgccagaactccgatccggtttgtactccacttccagctcagacacatgccacgacgccgcgtgcatacgtgaccaagatccgcgctccaactatgattgatatactcctcgatgatgtatcatcagagacctgcctgaatcatctaaatctcctcatcaatatcaagaagtctctcgaacacgatatttacatggattctacaagtaacctatgtacacttgacgtgccactaggaactgactaaccatacgaagggg

SEQ ID NO: 4032 - DNA, 194 bp, Lilium asiatic
ctgacgctaggctgatgttggtcaagctcggttagatctgactctagtggcagcgcaacgaacctacgtgatcaacatccaggcacccgccttgatggatatacatctcgatgatagacaataggagaaccatctatgaatgatctagatcgacgctctatatcagtgacacagacaaacaccatatctacatg

SEQ ID NO: 4033 - DNA, 263 bp, Lilium asiatic
gacaatggttcggtcttcagccctgaggtgcttgatctcaccgaggatgatctaattgcgaggtttgctgctggtgtttccatggttacatccttgtctcttgctctctcctacccaaccttggcagcggcaccccacatgttcatcaatgcttacaagaatgtgctggctgttgctctggccacggaatacagcttcccacaggctgagacagtaaaggagtatctgaaggaccccagcaaatttgctgctgctgccccagc

SEQ ID NO: 4034 - DNA, 433 bp, Lilium asiatic
acacgcgtccgctgacgcgtgggatccacacctccaccacagcaatcaagcaatgtcaggacgtggcaagggagggaaggggctgggcaagggcggcgccaatcgccaccgcaaggtcctccgggacaacatccatggcatcaccaatccggcgatccgtcgcctcgcccgccgcggtggtgtgaagaggatcagcggtctaatctatgaggagacccgcggggtgctcaagatctttcttgagaatgtcatccgcgatgctgtgacctacaccgagcatgcccgccgcaagacggtgaccgcgatggatgttgtgtacgcactcaatcgccaggggcgaactctgtacggctttggcggctgaagggatgaggtttgttctatgactagggtttctggtttggcttacttgttggtggggtgcctttggagt

SEQ ID NO: 4035 - DNA, 421 bp, Lilium asiatic
agaggaggagagagttgcaacttgacaagattccaggtgttgaatctctggcaatagataattgcggaaggctcaatagactaccagaagccttacatgctttcccattcattacaagaataacacttgcagcgtgtcccggcttggttcgttttgcagagagtaactttcctcctgcattaaaagagctgaggattgggaattgcgtgaatttgcaatatttggttgatgaaaaagaaaataataataagagtatgagtagcaacacttgtcttcttgagcacttagtaataagaagctgtccatctctaatatggttattatcaaggggcgatatatgcaatcgacttcaacatctcgaaattgaaagttgttcaaagctaactaggttatttttaaacgccaagttacccgtaatgct

SEQ ID NO: 4036 - DNA, 324 bp, Lilium asiatic
caatacctgaagaaacacgaggggtccacaccaccgcctcaaaaatggcaccaaatgaagacgagggaaaagatgcaaggcgctgggcaaaggctgctcctaccgccaccgaaaggtccttcaaagcagcatacaaggcataaccaagccggagagacatcgtctcccacaacacggtcgcgtgaacaggatcagatggacaatctatgaggagacacgtgatgtgcacaagagctgtattgaaaacctcaaccagcacgctaagaccatcacctaacatgcccaccatatgacagtgacgggctaagaacttgagtacacact

SEQ ID NO: 4037 - DNA, 245 bp, Lilium asiatic
  modified_base (233)..(233): a, c, g, t, unknown, or other
ccgtttcttgcttactatacatttaatagagcctgtgttcatacacacataaccagtggcccatccgtaattcttcagaggacaactggtggatcctcaccgatggttccccacgggaggcttgtcggcgccgacgccggcgatggcggcggatcttggggaggatctgatcttggaggtgttgaagaaggcggacgccagaacactggtgcgggcggcgtgtgttagtcggnggtggcgggcga

SEQ ID NO: 4038 - DNA, 252 bp, Lilium asiatic
gggggatccataccgatcgatccacggctaggagcttaagtctgcgccaacgcccgtcattgccgcggatctgggggaggatctgatcttggaggtgttgaagagggcggactcgagaacgcttgggcgggcggcgtgtgtgagtcgggggtggcgggcgatgtcggaggacgagcggatctgggaggcgatatacacgaggcactgggccttaaccggactctgcagcaaccaggtcctgtcgtttgtggt

SEQ ID NO: 4039 - DNA, 246 bp, Lilium asiatic
gcgccgccgccaccgtccaccgcaacgatggtggagaagggtagcaaggggaggaaggaggaggtggtcaccagggagtacaccgtaaacctccacaaacgccttcatggatgcaccttcaagaagatggctcctaaagctataaatgaactgatgaagtttgcacagaaggcaatggtgaccaacgatgtgaggattgacgtgaagctgaacaagcagatctggagcatgggaattcgaaatgtg

SEQ ID NO: 4040 - DNA, 242 bp, Lilium asiatic
ctactcctaacccctccaatggcccgcaccaagcagactgcccgcaagtccaccggaggcaaggctccccggaagcaactcgcaaccaaggcagcacgcaagtctgctccggccaccggcggcgtgaagaagccccaccgtttccgccccggcacggtggctctccgtgagatccgcaggtcccagaagagcactgagctactcatccgtaagctccctttacagcgccttgtccgggagat

SEQ ID NO: 4041 - DNA, 451 bp, Lilium asiatic
cattagctgaagaaaaaagaaaagtagccttggaagctgataaaatggcatcgaaagaagctgctgaaaaagaagctgctcgaattagagaagctgctaatgctgctgcagaagtggcatttaaagaggctcaacagaaaaaaaccgcagggagagaaatgttatcccagaaaatgggcaccagttcggccaaagatggacaattacaagggatccatgtcatggccacggatgctgcattaaaagccgagacaagccgactaaaaacatatgatgaagtcgcgactatgtaccactccgttgctaatgacttgagtagacatgctcgaaagattcaaacgttggtagcacaaataagtgggagccttgagaacgtcagggcaaaagccactgcattgatgaacattttcaaaaatcctgaatgccctcaccccatctctatattgaattt

SEQ ID NO: 4042 - DNA, 432 bp, Lilium asiatic
cggacgcgtgggatttcaagccatatttggtcagcatatgtttagcaatcgcctggaacagatctccatcacagaacttgagcaagtagtcaaccgagaagcagctgcaaactactcgtccagccagatattatctgtcctgaagataatggaagatgctaacagagtaatggtaacaggcggagtagtccgattagtttaagcggcaacaatcaatgggttcttcatatggggtgattgggggttgtcgaatatcacaattctgatgtatgccacccattttatgctttaaaatggggctctagatttaaattttactgaaaatttttggattaaatctggggtttgcgtgaaacttatggaacacttaatccctttgaagggatcccatgttggtttccctgtcttaatgtaaatgtgaagttcatgaca

SEQ ID NO: 4043 - DNA, 353 bp, Lilium asiatic
gcggtcagcttctctccacaagcggttgtagatctcatcggagatcgccggaggagcggctgaggatctcatcggagatcgccggagaagacgatgactcgcgggaagcaaaagatcgaggcgcagcgcaagaatgctgggaagaaccagaagaacaagggctcgcagctcgaggcccgcgccgtcacgctcaaagtcacctgccccatatgcaagggacaactaggaaacctgaaccaggttccggatcattatgctgccgaacacccaaaggagaacccttccagtgaatctggctgaccccttcactgcatactggatcttgtttgtcgaactgaatatatttaccagct

SEQ ID NO: 4044 - DNA, 210 bp, Lilium asiatic
tttatactgatctgaactttgttgaatagccttaattattaagcccgggggtggcgtaggagaggttgggacccacatcggatttctgaagggtgctccggatctcaatgttcatggatttaatgtttaccatagaaatcggctaatatggcctttctggccagtttttaacaatgcaagtcaatggcttaaaacctttggggttcctga

SEQ ID NO: 4045 - DNA, 325 bp, Lilium asiatic
tcgacccgagtagccgtgaccttgggaatcggcagtctctaggacttttggggaactaagaaatcttccttggcttctgagcacagggatttggtgtcagtgttgactgaaccttttaagtgattcggtttgagctttccaattactaatagttaatcggattagtacctgtgacaatgctagtttgataactattattaactgagtaagcaatctttatatatccaagtgattaactaggtgttatggaggatgagtgacacattctcacttattccaaagtaattaacttgctagagattttgtctcctggtgatagtgtact

SEQ ID NO: 4046 - DNA, 175 bp, Lilium asiatic
acgtccacgcgtccgctcaaacacattgtttgttgagggcctaacttctaaactgtactcgtcgaggaaagtttccaatatcttcgtgctttggtaggtttcaaagaggtcagacttgtgaacatggaatcaaacgtgctggaagaaacccccttgttctatgcttcgttgattt

SEQ ID NO: 4047 - DNA, 496 bp, Lilium asiatic
acccacgcgtccgcttgttgaacctcatcacattactactgatctgaactatgttgaatgcatcaattataaaccgcataatgggggaggagaggttgtcacccacatcggatttctgaagggtgctccggatctcaatgttcatggatttaatgtttaccatagaaatcggcttatattgcctttctggtcagtttttaacaatgcgagtcaatggcgtagaagctctggtgttgctggagtactcgaggcgaattttattagacctacccatgataaacaagattttgagaagtcgacactttatcagaaacttgaaacccgcctgaaagacatgaccatggagtattggaattatcattgccatttggttggacacccaactacacatgtcccttcgacacttgggcagttacgtaacgaccccaacacaagtcatcaatcatggcttggtggaaaagggaaacgtgagaatgaaactgttccaatggaacta

SEQ ID NO: 4048 - DNA, 306 bp, Lilium asiatic
  modified_base (52)..(52): a, c, g, t, unknown, or other
acgcttcggtcaccagtctctgtgccgtttattccggaactgatattacctntctagttgatgctgctgtaaaactatatgcttttaagcttgaattgactgcagttactgtcgtaccgtttaaaccagtatatgtttgtgatacccttgtttctaatctgaagaatgttgcactttctatatgcctgccataatgtttggtgttataaggctcattttatttttgttggttgtatatggttgattatgaactgattggtcaacattgcagccaacaagtaatgaactttcagtattttacttaaa

SEQ ID NO: 4049 - DNA, 305 bp, Lilium asiatic
cccacgcgtgcggtcgttcgtaacacttatcacttcaacatccaatctcaaaccctctatcagtataaaagccaaagcctcgcgggcaccaccttaactgtcaggggtccatctacccttactgcgttaattcgtgtgtcatgctgcttgtgctgcagccgacaccaccacagctggtcttgcttttggaggggttcagtcatgcatttgctgcctcggatgatgagtacgtgaaagatactgcagaagtgatcaacaaattgagaagcaccatgaacatggacaataaccaccccaacaataat

SEQ ID NO: 4050 - DNA, 442 bp, Lilium asiatic
gttcgagtcttgagagtggagagcttgaaagagaggagtgtggagtagatagggcagagtctgatcaaagaagcagcagtgtactgtctgcttgtgaggatggaggcatggagtgtaagttggactctggtgatgtgatggacattgatgacatgcgtgatgaagatgctattgttgatcagtcagatttaggtgttgaagagccagcaggaggttgtatgaacatgcttcatggttgcagaagtgtttttgagtatgaaaaattgaacaaaataagtgaaggtacatatggtattgtttaccgagctaaggataagatgacaggagaaattgtggcactgaagaaggtgaagattcttgatcgaagagatttagaagaatatggtttccctgtgacatcactgatagaaattaatattcttgcgtcttttcatcacccttc

SEQ ID NO: 4051 - DNA, 400 bp, Lilium asiatic
actcgtccactaaatcccccataattggctgtatcaatggctaactcagttaccgcttaaatagttacgggcataccctcattcagtggggagaaatctggttgtagaagggtggcttcccttgctaggtacccttcttctctcaaggttgaatccagtggctgcaataatatcaagaccgactagccttaaggaatcaatggtggtatgaactcgtcggatcgtcttgaatgcctctggatagacaggttaaggaaatggctgtttaccaatatcttgacaaatatcagtctaacgtcgatggccacaaccctatctacatcaccaacgactggactcccattggcgaaagttatccctccccgtactaccgccacttgaaatctgggcggttacccta

SEQ ID NO: 4052 - DNA, 384 bp, Lilium asiatic
ccttcaacaactccactccacattcacccttcaacaccggcaaaagcttcatcaagggtcatctatctactctcttgtcccctttatgtctcatttggattgttatgtgtaggattttggaaaagctcggatttgtgtggcaaaatgaggaaaggattaaagctcaagaaggaaaatagatgttgcaagcttgatgaggatgtactctcggatctataagtacccctcctcccccattggattatgggtaagaggtctcactccggcccgagtggtggagggcacattgttggccgtctttctctcggttttggaggaggcacattgtgagagcatctacaagtgatttcggagtggagagttcatcatgggtcttcgttgtgg

SEQ ID NO: 4053 - DNA, 88 bp, Lilium asiatic
ctcgctcgtgcgctgacacactcgatgagacatttttggacactcgaacgcggctattcttaagcgtccctgagtgcgacctactttg

SEQ ID NO: 4054 - DNA, 288 bp, Lilium asiatic
cagagagctcggctctaatggcgattccttcttcagcttccttcatagccaagtcttcccacctccttcaagctttcttcgatgccaaggcttcccatctcctgagagcgacaaggacgtccacttcctcctctaccttcctcaagaagtttccactgatggcgaccttccaatcttcctccatcgtcaacctccttacctgatggcgactcctccactacggcgagcttacttcatggccaaggaagaagacgagggcgactgcagtgaagacgacatctgaagcat

SEQ ID NO: 4055 - DNA, 443 bp, Lilium asiatic
ccacgcggccgggcattccattttgatatcaataccctattgaaggctaccttttgcgagcccatcaaatcaagggctttgtggcggtttgtggctgttaacaatgctatgttaaaatctatgatatgctcactgcaaggcgccttgtttcaagaaatcaagcattcaagggcaattggtcaagaattctgggtttacgtctgctgcatcaccttctatagtcctctgcatcgttgtcggtagccctctgctacatctccatctgcatctctcttctacatcttcgttggcatccctctgctgcttctctagttttctgccatccaatttgcttagcttcaatccacattgacttatatactgcagtatcatacatgcactttctccaatgcttgcctcttataccaatgcttgttttaatactttggtgagctcgatgtgcc

SEQ ID NO: 4056 - DNA, 430 bp, Lilium asiatic
gagagataaaagtggtcctattgagatactgggacattctgatagctttaacgtattaaaagttgtggtgagggacatcgttaaggcaattaagatgggtgttgatccagttcctgttcatagtggtctggggggtgcctactactttaggaatcctagaggtgagaatgttgctatcgtgaagccgacagatgaagaaccttttgcaccaaacaatccaaaaggctttgttggtaaagcccttggtcaaccaggtttgaaacgttcggttcgtgtgggggagactggtttcagagaagttgttgcctaccttcttgaccatgatcattttgccaatgtgccaccaaccgttctggtgaagattactcactcagtcttcaacggtaatgatggtgttaacaaaaataggacctacaagaaatttgttagc

SEQ ID NO: 4057 - DNA, 341 bp, Lilium asiatic
atctggagctgttgatgagtacaagaaagaggtggagctaatgttggaagtagcccgagcctatattctcaaatctaaggcaaccagccaagagatagtcgaggcgtcagtaattccctcttcagaacaaggtagttgaaggccgcaacgatcacgtaccatgacaacatagtattcgtaacactagtcagggcctcacaagttctagggcctccagccattgtagccatgtctgactgttcagtgttcatgtgagagtggtactactgggttcgtatacatgtatatggatagataggatgtacaaaccaaccaatcatttgaaatggaagacttggatt

SEQ ID NO: 4058 - DNA, 328 bp, Lilium asiatic
gctagactcgctcgtgctgacacgcgtgcggacacgcttacggcgacggcaagacgtatagtgccgctatcatgtgatgtagtatgtatccagggtacaaactggtccatatcaggtttaaaattcgctgagttgactcgtgactagattgagttgtcctggctcgagaagaaaatgagtcaactcggtttcatcgagtttttatccattttttgggtatagatttgacaaaaatcaacaggaaaattcaacctttgatactcaacgagccataattttttctagttgggcaatatattttcttgttttgaaggagaaaggaggtagg

SEQ ID NO: 4059 - DNA, 355 bp, Lilium asiatic
ggcacgcacggcagctataccgcgatctttcgttagcgatttttccgcttcaattatatgttcacgatgctgggcaaactgaaatggtgggggcggagctgctagcagcggatctggcgccatctaagcgacttcctctaatggagtaaacgaattctgattatatctacatgtaaataagcttgatgctcatatatactgaatgtgatgtgtttgtggtactcgtgctctataacgtaggatgatgaactatcttgaatactgatagacgggattaaactcatttaatactctgtcgtgcggtgcatattattcaacatttttctcgcgtatatgctacggcataactctcata

SEQ ID NO: 4060 - DNA, 388 bp, Lilium asiatic
  modified_base (313)..(313): a, c, g, t, unknown, or other
  modified_base (318)..(318): a, c, g, t, unknown, or other
gagttggcgtatgttaatcatggagagattaagaagtcgcttagtaattggattgcaagggtggcgccggatgattttgatccttcttgtacccgtatctgagaagcacaattcttgcagattctggaaataatctctgaaaaatggttacaatctttacattggattttctacacacaagccagacatgtctgtaaactgcaagttcccatgtgttaatcagatcggttttctacagtgattactaagacagcaatatggttgggttttttattttcctgtttcctcaagagaagcttgatgccttattcanggcanggaaaactggtataaaccttgatgctattttactgtaaattacattagttgaaaccgctttttcctaatt

SEQ ID NO: 4061 - DNA, 353 bp, Lilium asiatic
cgtgtcggctgtgcagggtctccacgttaccaacgaacgggggacaaagctccgggttaaccgtgacgccgaggtggcttctgcatccggatctggcacggagcggcagactgggggtggatatggtggcgacaagcggcaggagacgaacgattcgttccggagggccatgtacttgagctgttgggcgccaagctaattaatatgattgacctcagtcgacaatgttcgtgatttagggcggatctccggctaacctgtatggatgatgtttaccatcctttgaaagtaaattactggaattgtaactattcgttttatgaatataccctaaaggatgccttttgctcttt

SEQ ID NO: 4062 - DNA, 328 bp, Lilium asiatic
  modified_base (311)..(313): a, c, g, t, unknown, or other
  modified_base (315)..(315): a, c, g, t, unknown, or other
agcttgctgaggctgatgagtttgaagataagatgaaggagctggagggcatctgcaaccctatcattgctaagatgtaccagggtggtgctggtccagatatgggtggtatggatgaggatgatgatgttcctactggaggaagcggtgctggtcccaagatcgaggaggttgactaagtttcttttataatgctttttttaggtaactgaaagtatttccttggctatcttgccttgactgcttttgatgatgaacaccttacctgttatgtttaactactttatggctacattagtagtctttttgcnnncnttcttgatgatcc

SEQ ID NO: 4063 - DNA, 262 bp, Lilium asiatic
ggcgtactgcagagtcctcttcgtcactggcatggggagcagggtcgtcgtcctcggcgccggaactggaggagttctacggcgccgaatcgggtcgggtggaggctcgaacatactgcgatcatgtggcggcgctgacgtccagctatggacatacattctgccgactcctgatgcaccaaatgccacgactcttctgagaattggtcacgtgtgagtagagaagatgtcctctgctgccgattagtcatcaaacgtacat

SEQ ID NO: 4064 - DNA, 434 bp, Lilium asiatic
  modified_base (378)..(378): a, c, g, t, unknown, or other
accggtcactgatgctagctggtacacgtgttgatgccatacctacagctcgttttgatgcacagactggtgctgacagagaagttcagcgtatcctgatggaactactgaatcagatggatggattcgatcagacagtaaatgtcaaagtaataatggcaaccaatcgagcagatactttggaccctgcacttcttcgtccgggaaggcttgataggaaaattgaattccccttgcctgatagacggcagaagaggctcgtttttcaggtctgtactgccaagatgaatctaagcgacgaagttgatctggaagactacgtctctcgacctgacaaaattagtgcagcggagatttctgccatatgtcaagaagcanggatgcatgctgtgaggaagaaccgatatgtgatccttccaaaggacttcgagaaa

SEQ ID NO: 4065 - DNA, 199 bp, Lilium asiatic
agccttccgttcaactgggaatactctctcgtagcttttatgggttgttgtgttggaactctagccaaatcccagtcattatcagctaaaacatcaaagttacctcaaaaactaaagattcaccaattttcgagccggaggagaaggcgaaggcgatggtcatcaagtccggagacaatggagaacaacgttagtatat

SEQ ID NO: 4066 - DNA, 424 bp, Lilium asiatic
gcagcagctggtagactgtgcctacgcattcaataacttcggatgcaatggtgggttgccgtcccaagccttcgaatacattaaattcaatggtggccttgacaccgaagaatcgtacccctacgccggatccaatggcatctgcaacttcaaatccgacagtattggagtcaaggtcaccgactcagttaacatcaccctgtgagccgaggatgagctaaagcacgcagttgggttagtgcgtccagttagcattgcatctgacgtcattaggggcttcaaaatatacaagggaggagtttacaccagtgagacttgtggcaagactccgctggatgtaaaccatgccgttctggctgttggttacggcgtatagaacggtgtcccgatttgcttatcaagaattcatggggaaatgactggg

SEQ ID NO: 4067 - DNA, 153 bp, Lilium asiatic
gccccagtgtagccggcgtccctggcgatggtccttgcggtagtctgggtatacacttcgaggattggaaaaggtggttggttctgagcggaccagcccttctgggtggccttggccaggcattaaccctcgcatatattcctggtacgcacc

SEQ ID NO: 4068 - DNA, 432 bp, Lilium asiatic
cggacgcgtggcggacgcgtgcagagtatgttcgagtctctgaaaccgagggattttctggggcactgaagttacccaagtcaagtgccattaaagtaattgattttggtagcacgacatatgacaacagagatcatacttacatagtgtcaacaaggcactaccgagctcctgaggttatattgggacttggttggagctttccttgtgatatttggagttagggctgtatccttgttgagctttgttcgggagaagcattatttcagacccatgagaacttggagcatttggctatgatggagcgagtactgggtcctttgcctcaacatatgttgagaaaagctgatcgacatgccgtctagtatattagaagaggtcgattgaactggcctgaaagtgccacttctagagacagtatcaaagctggta

SEQ ID NO: 4069 - DNA, 425 bp, Lilium asiatic
cgcctccggtagctctctcttctagctttaatcctttcctgcatgtgggctttatccacattccggtgcttgcggagtacaacagcggagctcgctcaaacacctgagtttcaccgatggatgcgcccgaacagtatgcgtcagcgttggccttcatgcccatcgaccatgtacaacaacccctgcatatcccactccgttgaggcttcgtagtgataatagcctcctctctcccggtagaagaaatatgaggataacatgtgaacactgttctgctactatgcctatctgccactaattggatcttcatgactacagattgggacctggctcaatctatacaaacccaattaatgccctatgttccgattcttagctgcttgccaagctgcatatacttactgtcatacttccaaaggacttcg

SEQ ID NO: 4070 - DNA, 418 bp, Lilium asiatic
tggtaacattctacaccgctcgtgacattatggactctttttcaacttgattctatatttccccacacaatggctctctcatggatggtgtgacgatcacccctttacaacacatcctgaattacacatgtaccattcaatttatctttgaaactattctttacagaaatgccgttctcttattggcctttaacatgaacttcgtgctccataacatcctcacaaaatttgacgagattaaaaggcctcctgtctacaattctttatcatatcctgctatgatacctgtcttcatagaacccgaatagttttccctctacatcaaattagatgcttctttcaagaaacctgctaattttttatctaggactttctaatacgattacatcattcattattctttttagattgatctttt

SEQ ID NO: 4071 - DNA, 296 bp, Lilium asiatic
gcagtccggccgattccggttgcccacgcgtccggcatcttcgttatcagactttgtgcatggtcgatttttgggctccatggcgccaaacccactgaatacgggccttccgttgatcgagtcgccagtttagccacgttctttcaaaatcttatctatcttcgtcatcatgcaatgactggcagcaaaagcttgtcctgtgaatgttttccaatgcacggtttggtgctattattctatctgccggacatattgcaatgcagctgactgaaaatattttggctgccaacaccgga

SEQ ID NO: 4072 - DNA, 427 bp, Lilium asiatic
cggacgcgtggcggacgcgtggagattatgttagagtttctgaaaccaagggattttcttcgtcactgaagttacccaagtcaagtgccattaaagtaattgattttggtagcacgacatatgacaacagagatcatacttacatagtgtcaacaaggcactaccgagctcctgaggttatattgggacttggttggagctttccttgtgatatttggagtttgggctgtatccttgttgagctttgttcgggagaagcattatttcagacccatgagaacttggagcatttggctatgatggagcgagtactgggtcctttgcctcaacatatgttgagaaaagctgatcgacatgccgacaagtatattagaagaggtcgattgaactggcctgaaggtgccacttcgagagacagtatcaaagc

SEQ ID NO: 4073 - DNA, 403 bp, Lilium asiatic
tcgggcagcccgagagattatagagaaagtgaaggagaagtttcccagcggtgcagacaaatggaaggaagtggaagaaggattgcctcaatagaaatcgggaactaacttaaggtgctgttcacccgaagattgtgaagaacctcttctacaacaggctattttgctggcaaagaatggaaactaacagctctatgtttaacaatttcttgttttcatgttccgtgaagctttaatttttccgtgaacatgagtggcttagtactttgctagacagaagaaaatccgttggcggcgtcaatgttgccttatgtgagtttgttttggcgatttgttgtcaaattaacttatttaagttttgctgagtcaaaactaatggaggcaaaattgcgtagctttaaaa

SEQ ID NO: 4074 - DNA, 254 bp, Lilium asiatic
tcgtgataaggcactacaacaaaaaggaactgaagggctatgttcgagtttcagtcgggaagcccgaacacactgacactctcatggagtgtctcaaaatcctttcttgacagagcatactgattgagagaggttttgttgaatttcactttcaaattcatctttggagaactcataatgctctgttattttgaattgatgtatattgacattttgacgttttaatgttattctccgaatatagatgtgcatgg

SEQ ID NO: 4075 - DNA, 323 bp, Lilium asiatic
cggaagcatttgacacggctcgtaacagtatggagcttttgtcaactgttttgtcttcttgcccacagcaagatgttctcaaggatgatttgacgatgaccctggtgcaacagtgccagcaatgccagttcaccatccaaagaattatcgagacagccggtgacagcgaggccgtgctcttcgaggccttgaacatgaacgacgagctccagaagatcctcacaaagtttgaagagatgaaaaggcctcctgtcgtgcagtcggagccaaagcctgcaataataccggtcgccatggaacccgaaaagtttcccggttccagc

SEQ ID NO: 4076 - DNA, 246 bp, Lilium asiatic
gcggggtgcctgcgttgaacattttcgaaactagcttgagacgtggaaagtttgatgagtcacgcgtattgccaaatgggtctcttatggaaatcaccaaggttatccactagatgcagtgtatgattcacccgatgatgtacctgaagatgtgaaagcacacacacgctacgcaagatcctgacattggactgagcaggacgtggccgaaactggcaagaatgactttggaagtattgacattct

SEQ ID NO: 4077 - DNA, 361 bp, Lilium asiatic
aaagttggatgtttagaggaatatattaatgaactacctctcgcgtgaacgtttaattgctaaaatcttttgggaattgttatttttggtttttttatgtaaatggtatatatagtttatgaaagatggatatctatagaatgatggattttaaaacaaaatgagtggactgataactagagatttgaaaattctgttaaatatttaattttgtattacttataacatagaaaaataatcgacagatttaagtcctaatttttacactgaaactctgtaaataattaaactgttaaactattgacccttaagttggtcctgacctttgaaattttaacctttgaatggacctttggaattt

SEQ ID NO: 4078 - DNA, 423 bp, Lilium asiatic
cggtagcgttctacaccgctcgtgacctgatgggctttgtgcgaactgcagtgtcttctcccgcacacactgacgctctcatggatggtctgacaatccccctttggcagcacatcctgcttgacagaggcaccattcaatgaatctttcaaacacatctttacagaactgacgagctcttggtggcctggaacattaactactggctccataacatcctaacataattctaagagattaaatggccttctgtcgagcagtcggagccagagcctgcgatgataccggtcgccatgtaacccgaagagtctccccgctacagcatataagatgctcttgtcaggaagcctgcatgttctcgagcgaggacggacgaagactatgacatcatgcatgatctcgatgagatgatcttcggtacca

SEQ ID NO: 4079 - DNA, 264 bp, Lilium asiatic
cccacgcgtccggtcgcagctgccgggactcgtggagaagtgcatgaaagaggaaaacaaaatcaatctgagtggattcataacccacgagctgccatttgataagataaatgaggcctttgaactactgaagaaaggcaaatccttgaggtgcttgctccgtctgtgatctgatttgttcactgaactgggtagcttcgatcaacccatggtattagacagtttcaaattttcaataaggggaatacaagcatcttatcagtg

SEQ ID NO: 4080 - DNA, 448 bp, Lilium asiatic
ttacccactcggccgctcgttcttatgttctatccttatatcttctaatacgctattgcacaccacacatctattatgattttgctggcgtatattacacttcggagctatcaatctctgtgatgatacattcatggaaaccgaacatctgcttttccatacttaggacctcaacaatgcctaagcccgtaatcccaagaagaagaattctatagatttttcgacttctttacagaccttcaacaaaaatttcagaattttgaagcaagtgcattttctccagaaaagccgaaaagcttgtgggaggaattagctgctatcgaagaggaatttgttgaatttttggacaaagagctcaacatatctgatgatgaattcgaagaaaacaacataaacgacttcagttattcccataaaacatgatacacgcttcccaaatgaatcttac

SEQ ID NO: 4081 - DNA, 388 bp, Lilium asiatic
cacatccgtcataccactccatttttctaacataggctgctcacacaaacgccgattcttcattctccttggtggaaacatctctctcgcaggcgctatacacatagttgaggtaagtactctgcaaccagagatggttttggcgccaacaaaagcagatcccaacaaagcctctaaacaataccatcaaccggcctatatcgttcccaggagcggtggatgctgattggctctatggaaactagggaggcgattactggacctacccgtacaacttaaaaataaccaccgtacaactttcaatatgactcggatacttagaaccataacctgactaagaatatggctggtcacatcattgtatctaagacctaagttaccgacatga

SEQ ID NO: 4082 - DNA, 446 bp, Lilium asiatic
tcgtggactctgaaggccgctaccttttccttaatgctgttgctaaccagctgcgctacccgaacaaccatactcattacttctccttcatcctcctattcctatttgcagaggacattatccaggagcacataacatgagtgctgttggagcgcctcatagtcaatcgccctcatccgtgggggctcctaatcacttttatcgagctgatcaagaatccgcgatatgacttttggagccggccattcacaaggtgcgaccccgaaattgaaaaattgttccaacaggtgtcacgatcctgtggtggtccaaagacaatagatgatgggatagttgctgctggcatgcctgatggtaatcactaaatctctagattcccatcttgaacgctcgatatatatgtagtaacttaattctacaagagggcatgttaatattagattctc

SEQ ID NO: 4083 - DNA, 212 bp, Lilium asiatic
tccacgcgtccgcccacgcgttcgatctcttgtagttctctcaccttcgataacgatgtcttcttgctgtggtggaaagtgtggctgcgggtcttcctgcaagtgtggcagtggatgcaatggatgttggattgattcctgccttgcttaagggaacaattgcttttacaattttaacaatgggtttggtcctgcttaaggggaatttgaag

SEQ ID NO: 4084 - DNA, 433 bp, Lilium asiatic
cgctgcacaccatcttatccgaagcccgccgtctccggcaccggcgccggcgcggctcatctcgaagtgggggcgaagctcgtgcttcagtccaatcaatttctcggctagtgccaagaaccaggaggagggcggcggcggcggcggaaggcgtgtatggcgccgccgtaaattgacgaagaaagacgacaagttgcgatctctggtggagcgggtacctttcctcgaagaacgggtgaggaatataagggactctggcgagatactgagcatggacattgaccgactgatgctgtcacaagagaacaaggttgattttgtcaacgaagtggctgcataggccacagcttacctcgaaaacaacagggacgaatatggagcgaagaatccgatactgcatgtgattagtaaccgcatgaatgaagctggattc

SEQ ID NO: 4085 - DNA, 339 bp, Lilium asiatic
cccacgcgtccgcccacgcgtccgatctcttgtagttctctcaccttcgataacgatgtcttcttgctgtggtggaaagtgtggctgcgggtcttcctgcaagtgtggcagtggatgcaatggatgtggtatgtatcctgacttggctgaggggagcactgcctctaccactatgatcatggggtttgctcctgctaagggggagtttgaggcgtttgagatgtatgctgagaatggtggctgtggctgcaagtgtggtgataactgcaactgcaacccctgcaagtttggcaagtgagctctccatgagaggaggatgtagggtttgataccctttgg

SEQ ID NO: 4086 - DNA, 384 bp, Lilium asiatic
cgctgtacaccatgccgatccgtagcccgtagtgctgtcactcaccacctgcgctactcaggcatccgtgctgactaagctcgcgctacagctccatatcaactatctcgcctagagcactataccagaacgagtgccgcggctgctgctgaagcgccttatagcgcctccgcatattgaccaagggctactactaactttgatcgatctgatcaagaatacgcgatctgactttcggagccggccatatacagggtgctaccccgaaattgaaaaattctttcaaccgagtgtaacatcccatggtggcccaaagacatttgatgacgggatagttgctgatggcatgcctgatggtaatcactaaatctatagattcccatc

SEQ ID NO: 4087 - DNA, 220 bp, Lilium asiatic
cagtgcaagttacaggaagaggagtgtacggcgactgacacttatgcgggcccggactcatcagagaaccaaatactatattattagattagattaagctgatccggcagaggccagttgcctgctccggaagtggcgatgactgtgatcctgatgctagcaaaagcagcttgtattttgtaaattgaactgatgccaagttgcttactgcttgtgattc

SEQ ID NO: 4088 - DNA, 408 bp, Lilium asiatic
tcgcgctcgcgtccgtcctatcgttcgacctctgggttttgtatcacctccggcgcggatgatttctaggtgggggggaaagtgtggcttcagtccaatctagtttgtgtggtagtgcctacaacgaagatgagggctgtcgtgactggggtaggggtatcacgtgcctctcccacatatgaccatgagaagactacaactgctaatctgtagtgtaacgggttcgtgtatctatactaacaattgaggaatttactggacttttgctagttactgatcatggacattgagcaagtgatgctagcacacgataactgagaggatgatgtcaacgttgagtctgtataggcaacagcttacgtcgtaaacatgaatgacgaacatggagcgcatgatgcaatcctgcat

SEQ ID NO: 4089 - DNA, 330 bp, Lilium asiatic
ggagatatccattctgggttctgtgaagggttgattgtacagcgaaacggtgagaaaatgtacaaatacttacacaattggatgttacgcaacttgagttgactgatcctgtattcctgttttccttctacttacttggtttacttcactattgatgcatatagattgctacaacttatgaccaggagctatgatactattggtgatcgggcacctctttaactgaattattaccggcagattttacaacttttggacttttgttaaaagggaccctttcccaatggttaaaattgccgcaatgcgacgggcatcaaggattgcaatgag

SEQ ID NO: 4090 - DNA, 250 bp, Lilium asiatic
ggccaaatgggatgcttggaaggccgtcgaaggaaaatcaaaggaggaagcaatgggagactacatcaccaaggtgaagcagttactggaagaggcctcggcttgaatggtatattctacctctagttggagactaccaacggggtgttaagtatttctgtaacttgtctaaatttatgtcttggatttatgtcttggatggacgtacaaatagacgctcatgggcataataatgtgtactgtttactgc

SEQ ID NO: 4091 - DNA, 297 bp, Lilium asiatic
cgaaaccctaaccctaacctcccaccggctgcttcgaatcctcaccggcggcgaacaccatgggtcgcgtccgcaccaagaccgtgaagaagtcctcccgtcaggtgatcgagcgctactactctcgcatgaccctcgacttccacaccaacaagaaggtcctccaggaggtcgccatcatccccttcaagcgcctccgcaacaagatcgccggcttatccacccaccttatgcgccggatccagcgcggtccagtccgtggcatctcgctcaagcctccaggagaggagcgcgagc

SEQ ID NO: 4092 - DNA, 310 bp, Lilium asiatic
  modified_base (175)..(175): a, c, g, t, unknown, or other
  modified_base (233)..(233): a, c, g, t, unknown, or other
gtctttccaggctaatccggtagctgcgattcatcagtatctggagagaacacagccgcctgttcttacccaagagaaagaaaaccgagagaagcacaagggtaagaagaagaagaagatcaagaagtcatggaaaggggcatcatcaagttgccagtctatggaaatctgaaantttatgtggcttgagtaattttgcgaatgagctgcatttaatgtagattgtctaagtncagtttgagtgcggctatgtgagcattgcaatgtggcgccacctatctataatgtgactgacacgaaagctaatgcg

SEQ ID NO: 4093 - DNA, 401 bp, Lilium asiatic
ggctgtcctagctctagcgcgggcggtcgttcttctgcatctggacagacgcctgcatcctactttttctcaggtctatgatggcggcgagattcacctggctggcgcgcgtatgacaaccctgtcgcttgagaaacgggcgtcgttaccctaccaatgcttgtcgatcggcacttctctttcgcttgagtgctttttcgaatgaactgccttgcaatgcagactctctaacaccgtcgcgagcgctgtgatgtgtgcgtcgcactgtggagccgcccatctatcacgtgaatgacacgaatgttactgacatgtacctcgtgtcttataacttacctcgggtcacggtcatttgctgtgtacgattctttttctgaacgtgaatcggggtgtttccactg

SEQ ID NO: 4094 - DNA, 394 bp, Lilium asiatic
ggcgaccacaccgtcgccgggctttcccgcgaggagctcctggccctcccctgctttgtgcgtcccggcagcgaggctgagtgtgcagtgtgtttggaggtccttcgtgcgggggatctctgccgggcgttgccaggttgcaaccatgagtttcataggacctgcgtggatcgttggctggtggctaggccggcctgccccatctgccgctgcggggttgcggctgatggaaagctgactcaagcgaagactggatggctgtgaagagtgtgtttgttgtaaggtagttaagttattagacagcgattatgtataatatatatggtaattgtggacctctttaatgaaatgaagtgatcatttaaatgaaggcatctttttattttggtatgtt

SEQ ID NO: 4095 - DNA, 433 bp, Lilium asiatic
cccacgcgtccggtatcaacaagatgctttcgtgtgcaggagctgataggcttcagactggtgtgagaggtgcctttgggaagcctttgggaacatgtgctcgggttagcattgggcacgtccttctctctgttcgctgcaaggacaacaatgggaacaacgcacaagaagctctacctcctgctaagttcaagtttcccggccgtcagaagatcattgtcagcaggaagtggggctttaccaaatataaccgcagtgactataatatgtggaaaggtatgaaccgtatagtcccagatggagtaaatgctaagctgcttggatgccatggccctcttgcttatcgccagcctggaagagcgttcatagatgcttgtgcccaataggaatgtcctacccgtgaatgaaacattctcaactctttcagcatgtg

SEQ ID NO: 4096 - DNA, 448 bp, Lilium asiatic
gcaaaatgcatctgcaatgtctacccaagagcttcaagacgttgggaggaaaaatatggatgagactgagcaggctattgagcgttcgaaaatggttgttgagcagacgattgaagtaggaacccaaactgctgcaactttgaagggacaaacagaacaaatgggtcgtgttgttaatgagctagatacgattcatttttccatcaaaaaggcctcacagctggtgaaggagattggtaggcaggttgctactgacaggtgcatcatgggtcttctatttctaattgtttgtggtgtaattgcggtcattattgtgaaggttgtgaaccctagcaacaagaacatcagagatatacctgggttggcaccttcggccccaacatctatgaaaattgtgtcggtgcaagcttttggtggttcttactgatgctcaaaaaaaaaaaaagca

SEQ ID NO: 4097 - DNA, 55 bp, Lilium asiatic
  modified_base (36)..(36): a, c, g, t, unknown, or other
aaaaaaaaaaaaaagtaaagtataaaaataaaaatnaaattaaaaaaaaaaaaaa

SEQ ID NO: 4098 - DNA, 403 bp, Lilium asiatic
  modified_base (171)..(171): a, c, g, t, unknown, or other
cccacgcgtccgatggaatcaaatccctacttcgcagtgagcggtgggggaatgtcagaaggatacaatgctggcttgaagcgtccgaggatgatggagccaaacccctatctctctggagctgtcggcggcagcagcttctatcagccttttggcgggtacagtggcggngctagtggttatggtggtggggccagcagcatcagcagctttccagtggttcgtctcaagggcctgcctttcaattgcaatgatcttgatgtctaaaagtcttttcttggcttcattgtcgttaatggttggttggtaataaaaaatggccttttttttgtgaaagccttggttgttttttggtaaccaatccatgggaaccttcttttcaaaaggataagcaaaacattgg

SEQ ID NO: 4099 - DNA, 213 bp, Lilium asiatic
gccactcctacatttgaatcaaattcatacttatcaccgagcggaacttgaatgttagggggttacaactacttctcaaagcactcgttgatgatagacccaaaccctctatctatgtatatctgtctgaaaaaagcagcttctatcaacctattgtcggctacatttgacatgtctcgcaattataaaggctgaaccagcagcatcatcagc

SEQ ID NO: 4100 - DNA, 289 bp, Lilium asiatic
cggacgctacctcaagaaaggccgttatgcaaagcgtgtaagcttcggagctacagtataggttgccgacgcgctcgagtacctagctgctgaagtgctggagctggctgacaatgctgacaaggacaacaagaaggctcggatcatcccgaggcacgtgtgacttgatgtcaggaacgaccaggagctcggcaagctgctcgctggagtcaccatctaccatggtggtgtcatgcacaacatcaaccaggtcctgctctgcaagaaagcagctgataaaggagattct

SEQ ID NO: 4101 - DNA, 65 bp, Lilium asiatic
ctcttaaaacgtcaatacactccttatctgatccattttaagttcatcacccttaatacgggggg

SEQ ID NO: 4102 - DNA, 465 bp, Lilium asiatic
tctcaccctccccctaatccccgatcactgccataatcgctctcgcatgaacggcggaggggcctccgccaccgccgccgtcgttacgccgccgccgcgttactcgcacgagtaaccccttcgaactgagccgttttcgatcgggcctttaacagccgatccagacgcgcgcgatcaattctcagatcccgacatcggcgatggaggagggcaggatgttgcattggggggtcttcagggcggtgattgcgatcctgcagtggtggggattcaacgtcaccgtcatcatcatgaacaagtggatcttccaggcatggtaaggtagagacggagacatggcccgcttaatggagaacagaaataggatgcgcgcagggtggcagttaaggatagatggatcacatctttgagactaaattaaagtttggctgttagtttttgcactattcgcaatattctatttat

SEQ ID NO: 4103 - DNA, 438 bp, Lilium asiatic
ctcacgctctcgatctcgattctcctctcgccgagatgtcgtcgaaggaggaaccgcggatctttgtcggcggtctctcatgggacacgacggagcgccacctgcaggatgccttcagccgcttcggcaagatcattgacactcagatcatggtggagagagaaacaggtcgccctcgaggatttggatttgtgacctttatagatagacgtgctatggaagatgctattgctgagatgcatggtcaagatttgggcgggaggtctatttcagtgaacaaggcaaaacctaagattggttctgatgatcgtggctaccgtagaagtgggggctactcatctggcggtagaggaagctaccggggtggtgatgttcttccatctgttgggaactctgattgcttcaagtgtggacgcccgggacattgggctcgtgatt

SEQ ID NO: 4104 - DNA, 468 bp, Lilium asiatic
  modified_base (66)..(66): a, c, g, t, unknown, or other
  modified_base (201)..(201): a, c, g, t, unknown, or other
ggttagcatccatcgcacggtctgtgcgacctttaataatcttgtgtttgcggcggatggggtgtnaatatgtggagtactgtatcacctttcggccttgtgcacgagttcggctgcactactcggagcaaaaatgcgtaatgactcctggattagggctcatgtgtctgacacttgacctgatgctccagcattaatagngcgtgatcataataatcacgattgttatctaaactgtcaactgacagacttgagcatgctcatgaccaccctgaacgtatgcattcaagcgagtcaactccttacgatgctcactcaccacagctcgaacaacaagaggaggtgaagggattcataaaatactaccgagcattgatattttcttataggagaaaataaattatgagctcttccgggtaatctactaatataacttgttgaaagaaaaaaaaaactttacaatcacta

SEQ ID NO: 4105 - DNA, 258 bp, Lilium asiatic
agccggtggcggagaagcccgccgccgaggaggagaagaaagcggccccagccgggaaggagccggcggtgaagaagcccaaggctgggaagaagctcccggcctccaaggaaggggagaagaagaagaagaggtcgaagaagtcggtggagagctacaagatatacatcttcaaggtattgaagcaggtccaccccgacattggaatctccagcaaggtcattgggataatgaacagctttatcaacgatctcttct

SEQ ID NO: 4106 - DNA, 270 bp, Lilium asiatic
cccacacgtccggagatgcgtgcggcccggctcgcctgttacaacaagaagaacaccatggcgtcccgggagattcagacctccgtccgcctcatcctccctggtgagcttaccaagcatgctgtctctgaaggcacgaagtttaccagcgcttagagtatttatactgttcgagggttctcatcgggcatgtatttctttctttttatcacgaaaaaaagaagtttgttgctgctttggtccaaaaaaaaaaaaagaaaaaaagggcgg

SEQ ID NO: 4107 - DNA, 432 bp, Lilium asiatic
cctgaatatacatagaccacgcaacgaatggagcttactcgagtgggcaaaaccggttatgagggagtcgagaatcgaagaaattgtagaccccagtataaagggcgggtaccacgcagaggcgatgtggagggtggtggagactgcattagcatgcatcgagcccttctcaacctacaggccaaacatggtggatatagtccgggaactcgaggatggactgataatcgagaacaatgcgtcagagtacatgaggtccatcgagagcgcaggaggctccgggcgctttgtatctatagagaggaagatgatgatgcctgtgccgactccgaacgacacattcacccatcagataactggtgttgtacaacccagataatcagatttttggtctgaaagccaaacagattagtgtaatactgcattcaattt

SEQ ID NO: 4108 - DNA, 192 bp, Lilium asiatic
cctgaatatacatagaccacgcatctaatgttgcttactcgcgtgggcacaaccgttgatggggaaatttataatcgcaaacattctacaccccagtattaaaggcgggtaccacacataggcgatgttgtcggtggttgatactacactatcatgcataaaacccttctgaacctacatgataaacatggt

SEQ ID NO: 4109 - DNA, 210 bp, Lilium asiatic
  modified_base (66)..(66): a, c, g, t, unknown, or other
ctttaagaaaactagatgctaatggatgcttttgatcttaatcagcaatcaaggggcgagattgcnaagctggaaataagatgtgcaatctcaacatgaattcattaggccccagcatggcagtcaaggcatgcgatatctcctgcactaaagatggtatctgacataattgttcttgcattccgtgttccaaaagaattgattgggcat

SEQ ID NO: 4110 - DNA, 52 bp, Lilium asiatic
gcctcacattaccaatgctaaaactttaagtatcgttacactcataacaaat

SEQ ID NO: 4111 - DNA, 255 bp, Lilium asiatic
gattctcatttaaaatcatataactaactttttagaactgttgaaccaactcggggcgtgtgcactaataaaaagattcttttactcatatctttcttaatgtgtaattgattcattatttatgctgcaagatatcttatgttatatattctgtatgctattttttgttacgttttcctttttatccactccaattatactgggtgttttagcttctattattaaatattcatcattcaattatcattatttatt

SEQ ID NO: 4112 - DNA, 241 bp, Lilium asiatic
tctgcgattaacaatctatacattcatgcatgtatgacatgcatctttatagagctatggtatacactactcagtcctccacatgatatgctggacctgatgactaacagcgacgataaatgttggtggccacttactcaatgccatgacgatcgagcatttcatattgagattaccttattcctctaaagatgccaaccttaaacagcttgaaagtgaggagatgattacatggggaaaa

SEQ ID NO: 4113 - DNA, 391 bp, Lilium asiatic
caagggactgatcgccgtcaagaccaccttttcctccaaggacaaggacatgaagggccccacctcccgctccttccgcgctgggctccagtttccggtggggaggatccacatgcagctaaagtcgcggattgctgtcaacggccgcgtgggtgcgacggctgccgtgtactcggcggcgattcttgagtacctgacggctgacgtgctggagctggcggggaacgcgagtaaggatctgaaggtgttttatttatgtgtaggtgtatctgaggtagtgttctgtttctgttattggttgttggttgtgttggatatgatgaatcgtggtcgtttaatttttatggatacttggttttatggggctagttggttaaaaattgtgaattcc

SEQ ID NO: 4114 - DNA, 471 bp, Lilium asiatic
  modified_base (93)..(93): a, c, g, t, unknown, or other
  modified_base (257)..(257): a, c, g, t, unknown, or other
  modified_base (393)..(393): a, c, g, t, unknown, or other
ttcgacgccacgacgctcacgcgtctgttaaatgtatttaaggtccatgaacacaactttcgtaataagcactcactttttggtgcggagggncaagctgttactccgtaagctagcattggtggagttatctgcccttacccatcaacacaagcttgcgttctggattaacatctataattcatgcatgatgaatgcattttaagagctaggtatccctactagtcctacatatgattgctggactgatgactaangcgacgataaatgttggtgtccacttactcaatgccatgaccatcgagcatattatattgagattaccttattcctcgaaagatgccaaccttaaacggttgaaaagtgaggagatgattacatgttgaaaattcntattagattgatctgaacccttgggtacattcgcactctaatgtggtagttggtcttcacctgctgtgagagtatata

SEQ ID NO: 4115 - DNA, 441 bp, Lilium asiatic
gccgaaggagaagaaggcctcaacgaagaagcctgccgtgcatcccccatatcttgagatgattggcgaggcgatcgcgtcgctgaaggagaggaccggatcgagccaccacgcgatctcaaagataacggaagacaagcacaaggctcacctactggccaacttcaagaagctcctactcgttcagcttcagaaacttaccgacacctgcaaactcaccaatgtcaataactcttataagatctctgtcaagcaccagccactgctgcgaagcccaaatacgttgctgccgccccgaatgcgaagccgaagtacgacactgctgcatctaaggcgaaactaaagacgaaatctgctgcagcgaaacttaagaaagctgctgtgaagccgaaacggaaatcctctgctgcgaaggctaaatctaaggctgcggtcgtgaaa

SEQ ID NO: 4116 - DNA, 279 bp, Lilium asiatic
acggccgctctctgtgtttgtggacacttatggtaccggtaaaattcccgacagggggggactgaatattgtgaaggagacctttgacttccggtctggcatgatcaccatcaacctagatttgaagaggggtggcaatgacaggttcctgaagactgctgcctattggcatttcggccgggatgacccttacttcacctgggaagtgattaagccttttaagtgggaaaagcctactgcttaatcaagcttcttttatatctaggtgattaccatata

SEQ ID NO: 4117 - DNA, 416 bp, Lilium asiatic
  modified_base (341)..(341): a, c, g, t, unknown, or other
ccacgcgttcgcggacgcgtggggcagttgacgcctaaacttgatgccgagcagcaggtgctatttaagaagcacattgagggggccattaagtttctgcttccgaagcttagtgatctgcaattttttgtgggtgagagcatgcaggatgacagtagcctggtgtttgcttattacaaggaaggtgctactgatccaacctttttgtacttcgcgtacggattgaaggagatcaagtgctagacttgaaaaatggcagcatattggaaaaatagtttagtttactagtttgcttgttgtgctctatggatgttgtgatattatgcttggtttttattcgntactgcgtactggttcaataaaaacttttttgtactgctggaattaaagtttatttataatttgggtttatgcgg

SEQ ID NO: 4118 - DNA, 336 bp, Lilium asiatic
cgcatactgtgccgtgtaaggtgactggtgagtgtggatctgtgacagtgaggatggttccggcgccgcggggggcggggattgtggctgccagggtgccgaagaaggtgctccagtttgctggaattgaagacgtgtttacgtcttctcgtggatctactaagacccttggttactttgtgaaggctacctttgattgccttatgaagacttatgggttcttgactcctgatctctggaaggagactcgctttgtcagatctccgttccaggagtacacagacttgctgtgcaagcccgcgaaggcagttttaattgaagatgttcctgagaaag

SEQ ID NO: 4119 - DNA, 101 bp, Lilium asiatic
  modified_base (1)..(1): a, c, g, t, unknown, or other
  modified_base (73)..(73): a, c, g, t, unknown, or other
ngaccacttcgaggaaataggtgacgggggttttgttttttttgtccaaagagttatgatggcgggtgggcantttgcaacatgttcaagctattcatatg

SEQ ID NO: 4120 - DNA, 317 bp, Lilium asiatic
gcgccacgcgtccgttgactcatggttctgttgacgccttatcttgatgccgagcagcaagtgggattggggaaacacatttatggggccattaaaattctgctttcgaagcttagtgatctgcaattttttgtgggtgagagcatgcaggatgacagtagcctggtgtttgcttattacaaggaaggtgctactgatccaaccttcttgttcttctctgtcggattgaaggagagcaagtgctagacttgaaaaatggcagcatatttgaaaaatagttctatgtactagtttactttgttgtgctctatggatgt

SEQ ID NO: 4121 - DNA, 284 bp, Lilium asiatic
  modified_base (76)..(76): a, c, g, t, unknown, or other
acgccatactgtgccgagttaggtgactggtgagtgtgttgctttgacactaaggatggttggcggcgcgcgccgnaggctgggattgtggctgccaaagtgccgaagaaggtgctgcagtttgctagaattgaagacgcgtatacgtcttctcgtggatctactaagacccttggtaacttcgtgaaggctacctttgattgccttatgaagacttatgggctcttgacttctgaactctggaaggagactcaatgtgtaagatcttcggtccaggagtacac

SEQ ID NO: 4122 - DNA, 363 bp, Lilium asiatic
agatggaccacgcccgctcttatcgatccaaaaaatcaatccacgaacaaatggcggggcatatgattgatcacgccaccctgaatgggccaaatgtgctgaaggatatatccatgggcatcacactaaccctagctgttccaacttagatgaactatgcatcatatggaacgtgcagacgatgaccaaaatattatacaatatgctaccaaggggtcttatcaacagcatcgcaccctaaaaatagaatgttacgcgcgctatagcaactcatttatcccctattgtgtactcattacacacactgtgaacgttaaacaacacagcctcctatcggccactgataatgcgggtttacgcatg

SEQ ID NO: 4123 - DNA, 273 bp, Lilium asiatic
gccacgccatgccggaccctaggtattgagattattaagcgaggaagaaatggtggggcatgggatagcacacgccgctctgatcgggccaaatttgtttaaagtcaactacatgggcatgacactgggcctagctgctagggggtggccgaagaagcattattttatcgagcattggatgaccaagaccttttactattatgcttaattggggttagataagtggcattgtctcaaaagaatattcttttttaccccgaaattatggaactt

SEQ ID NO: 4124 - DNA, 136 bp, Lilium asiatic
ggcatatgggtaaggctgaagtattggcccttatgtactctgctttaacatttggtttcgtatctgctttgcttttggtttatgttggatttacattgagtgaatggatggacggtcatgaagggttttgatcttc

SEQ ID NO: 4125 - DNA, 248 bp, Lilium asiatic
cttcgcgaccaggtcgagggaatattttaagagaggtgttttctgttcttgcccaaaggtgttaagcgcgcgtattcaatatgcgacacgtgcaagctctttatatatgcgcggtgccaagaagaggtgaaaccgggagaaagcgtttttgtacacgctgattcaacagagcctggaaaatagcgtgcctgggagggtgcactcctttgtcaaagatgccaagcgaaaaaaaaagatattgtaggaaa

SEQ ID NO: 4126 - DNA, 250 bp, Lilium asiatic
accgtctgctgttatctgcttaaaaaatcgtcgcaccctaaccatcgcttcgtgtcatgggggtgcgtcctgcaaagacaccactgtaaacacgtaattactcgataaaaatgtaacgcgtcagacatacagatcttcctggcgcctgcgcaatatcagcattcgcgcaaataaatgtattatatctttcgagaaatactgtacgctcgattaccatggttgatttctacatctataacgtatgtctcta

SEQ ID NO: 4127 - DNA, 131 bp, Lilium asiatic
  modified_base (19)..(19): a, c, g, t, unknown, or other
  modified_base (69)..(69): a, c, g, t, unknown, or other
cccggggcgacccacgcgnccggccgcgcaacgcccaaaccaacggccccaaaaaaccaaacggggaanaaacggcggggggggggagaaaacgcggcaagcaaagagcccaacagaccaacgcacgcaag

SEQ ID NO: 4128 - DNA, 72 bp, Lilium asiatic
ggaatgttttgcgttcggtcttttcatgggttatatactgacgttcgctctcatacaaagggatcgttctac

SEQ ID NO: 4129 - DNA, 133 bp, Lilium asiatic
cttttaaatctctaacacacaaatatagaatttaccagacgtactttcacttgcaagcgtcgggggactatattcctttgactcagccaagatcaatccaaactgcgtctttacacaacatacgtactgatca

SEQ ID NO: 4130 - DNA, 277 bp, Lilium asiatic
accgactgctgttatctgcttaaaaaagcgtcgcaccctaaagaactcttcgcgggatccacgtgctccttcaaagacaccactgtaaacacgtaattactcgataaaaatgtaacgcgtcagtcatacagattttcctggcgcctgcgcaataaagcattcgtgcaaataaatgtattatatgtttcgagaaatactgtacgcttgattaccactgttgatttctagatctagaaagaatgtctctatctgctgctataccagctcaggtgcttcg

SEQ ID NO: 4131 - DNA, 454 bp, Lilium asiatic
ggcggcgcagccgccccccgccgccacgatgcagatcttcgtcaaaaccctcaccggcaagaccatgaccctcgaggtcgagtcctccgacaccatcgacaacgtgaagactaagatccaggacaaggagggcatcccgccggatcagcagcgcctcatcttcgccggcaagcagctcgaggatggccgcaccctcgccgactacaacatccagaaggagtccaccctccacctcgtcctccgccttcgcggcggcgccaagaagcgcaagaagaagacctacaccaagccgctgaagataaagcataagaagaagaaggtgaagctcgccgggctacaattctacaaggtggatgatgccggcaaggtggcgaggctgcgcaaggaatgcccgaatcctgagtgcggcgcaaggacgttcatggcgaatcatttcgatcggcactactgtggg

SEQ ID NO: 4132 - DNA, 234 bp, Lilium asiatic
ccctctctgcaagattgaggcatatcgcacttcaattattcgcatcttgagtgcatcatatcaccttcaaggattgctgagataagcacatgacattttatgttagatgctatcgtgagcaatactgtgtgtcgcctcatgcatttcatgtgggtgtcatcatatgtgtgtttctccgattgcaactttatccttagatttgtttgggtggtcatattctttttctattatcgt

SEQ ID NO: 4133 - DNA, 52 bp, Lilium asiatic
cacaggcggtgcaaaccacccttcaaaatattttgaatgtgtctagtgtaat

SEQ ID NO: 4134 - DNA, 365 bp, Lilium asiatic
  modified_base (255)..(255): a, c, g, t, unknown, or other
ccacgcgttcgcggacgcgtggggtacgttggtagagattggatgtgttggtagggcaagcgtcatgagaagcacatctgacgaactaatgtctgggattactggaacatggtatgtcggacgaatgaacgtctggatcaccggatcatgtcagggcctgtatgttgagagagagccgatcgttctggatgtcgtagaggaccgaacataatgggggccgctggcgaatagctgaaaccaagtctagagaagctngagggccggagatgtagcttatgatgcatcatgtagtggagtcgtagtaaccgggcgaggaggaaagatgaatgtagctgtgagttttttttttaatatacacataatac

SEQ ID NO: 4135 - DNA, 413 bp, Lilium asiatic
ccaagcccattttgacccttaacatacttatcaacaacctctatgataagatggggcagagttcagctcaaatacaccgctccaacaagaataataccatcacctctcatgagatccagacctaagtcccccttgtactacctggtgagctcaccaagcatgccgtttatgaaggcaccaacgccgtcaccaaattcaccaacccttatgctttgttctgttcggcttagtaatttatacctgctattaaaatctttcgatttctgatcgaaacttatgatactatcaatttcccaacttttgaatcttgctctataattatatttctcaatcactcgaaaatttccaataatcgctcggtttgccctcttaattattcttgaatttatctgaaattttttacctatttaatt

SEQ ID NO: 4136 - DNA, 183 bp, Lilium asiatic
  modified_base (33)..(33): a, c, g, t, unknown, or other
tcaacaccgttcctatcatcatcaactcctaantatatccattgccgtttctggggatcgggggagggatagcttcactggccaactagatttctaattcgatctgaacacaaactttcctgtacctcactcaagccctgcgaacagctaccacatttcttcttttctgtgaggtgtcgttcg

SEQ ID NO: 4137 - DNA, 298 bp, Lilium asiatic
  modified_base (200)..(200): a, c, g, t, unknown, or other
cagacgcatgggccgacgcgcgggtggccactatccctcgtttaaaactggactgtatggggatcacgtacatcctgaactcgaccatgacaagcttaagagcttatttgctatatctggggagattgttgcacgaccgattccctttctccttgaacttgattgttcatggaggtttgccctatttctctacaagaccncagatgaggctatgaatgctctactacaggcacaagataagatgttccatggatatccacttcaatgccaggacagtccagatgatcttattgagatt

SEQ ID NO: 4138 - DNA, 282 bp, Lilium asiatic
accacgcgtacgggattgtggagaattaacacgtattcgaaaagaaagggggaagaattctataactggggagaagggtgacattatatttggcacctttgaagattcattagcagcaaaaagggcacttcttaaggaatcaccattcggtgatggtctgccggtagagatcacgacccgtcaatctgacttcgtctggcttaagccaaaagaagtgaagactattagcaacattgagtctgcaggtgaaaagcacaatgagtttagaaacatgtatcaaaa

SEQ ID NO: 4139 - DNA, 318 bp, Lilium asiatic
aaaaaaaaaaaaaaaaaaaaaaaaaaaaaatttaaaaaaaaaaaaaaaaaaaaaaaaaaaaaccgggaaaaaaaaaaaaaaaaaaaaaaaaaaaaaaaaaaaaacccatttaaaaaatttaaaaaaaaaattttaaaaaaaaaaaaaaaaaaaaaaaaaaaaaaaaaaggggggggcggttttaggggatcaaattttacttccgggggttgggaaggtataagtttttttttgggggccctaaaataaatttaaggggcgggggtttaaaaagggggggaggggaaaaacctgggggtacccaaattaattggcttg

SEQ ID NO: 4140 - DNA, 310 bp, Lilium asiatic
  modified_base (305)..(306): a, c, g, t, unknown, or other
gcagtcggagccagctacctacatcaatgcaccgctcgtcggcgctcttgcatatctggctcattcctccggccagttgtagagtgaaacagagtggtatctatatatctatatatagtactgtgaggggatgtattaagctagtgttgaaaccccagctctactaagagtgagagcgggtgggttggattagtaggttttaaggggagttgtggttgattgtgtgttggtaattagctctgttgtaatgctgtatttgtgtgggcctttaagtatttcttaattaatatgagtttggtcccccnnaaaa

SEQ ID NO: 4141 - DNA, 382 bp, Lilium asiatic
cccacgcgtccgatttaaaagttggagagcagctatattgccagccgtataccttctcggcagggttttttttagtttgttttgtcttgcatgcacgaagctctatacaaactatttgggtttgttggatatgatttgggctctctcacaagatctctgacaatgatctgattccaattggacatgatctgcgcttgcccacactgtttggacgagataaaggatgaagctacgggtttgtgagctcagatgcagtgagcagagtctgtcggatagggttgatgagattaaaggttttgtaatgatgggtcaagatttgtgtggtggataaaaaagttgtgttgatcaggtcgattaccgggtgtttttgtacaacaggcca

SEQ ID NO: 4142 - DNA, 219 bp, Lilium asiatic
gcgtccacgcgttcgggatcatcatcttctattggggatgacgttctggatcttgggcacggggactcaagtaagtttttgtcatgaatgctattgtaattcgattcgatgtttgtgttcgatgccatatgtgttgtagttatcaatcccttttgtactatataaagtttgttttcccattctaacaacctttggccgttatggctggaggacttgaag

SEQ ID NO: 4143 - DNA, 264 bp, Lilium asiatic
ctgaagaccaccttcaaagcgtctcgtcccaacctcttcatgtagaagggatttgaatgtgtggccgggatgtcttgttttcatgaggattttcgttagattatctttctgttctgttggatcatatgatattgttttgggattattcatacttctaagagtagggctgtgtgaagctcttatttgctttctccaatataactacaggacttgcatataaatttaatctctctatttcaataacttgccgtctctctctatatg

SEQ ID NO: 4144 - DNA, 416 bp, Lilium asiatic
agagtggcaaggcagttgggccaatagtggatggtgatgctgttgtaacattcaacttcagagcagatcgtatggttatgcttgctaaagctctagaatatgaagattttgacaagtttgaccgtgttcgctttccaaagattcgatacgcaggaatgcttcagtatgatggtgaattgttgcttcccaaaaagtaccttgtttctcctccagagattgagaggacttctggtgaatacttggtgcacaatggtgttcggacttttgcttgcagcgagactgtcaaattcggtcatgttacctttttctggaatggaaatcggtctgggtacttcaacgaagccttggaagagtatgttgaaattcccagcgacagcggaattacattcaatgttaaaccgaagatgaaagccttg

SEQ ID NO: 4145 - DNA, 391 bp, Lilium asiatic
ccagtttgtcacgcgcggaaccctgcttggccgccggtttgactcggcccggccagagtccggtccggttcggcatgagcggaaaccggtagaggagacttacgctgacgtggcgaggttgctgaagacagagggggctcacataccagggatcgtgaatccgacgcagctggggaaatggttgcagatgtgagggcacacgtggcgcgtgctcattggatggtggtttgaggaattccgtgcatgcatgggggtggaggtggtggtgagtttatcgaacctttgaaaggtggcagaagagaaaaaacagtagttttgttgttacttcttttaagagtagtgttaatgtagttttgtttttatggtgtaagctaagttgatatttcttgtt

SEQ ID NO: 4146 - DNA, 418 bp, Lilium asiatic
gcagagttctctccctcaatggcgatgggagcagggtcgtcgtcctcggcgccggaactggaggagttctacggcgccgaatcgggttgggtggaggctcgaacatcctgcgatcatctggcggcgctgtcctccgatctctctcacatccctcctcccgattcctcatgcaccaaatgccacgactcttctgagaattggttatgtttgagttgtaaagatgtcctctgcagccgctttatcaacaaacatatgttcgatcactatcaagaaactggccactgcctggctcttagctacagagacctatccatttggtgcttcaagtgtgaatcatatcttgacgctcgagcaattggtcagctctggcccgtttatgaagtcgcctatatactaaagtttggagagaacccaccct

SEQ ID NO: 4147 - DNA, 423 bp, Lilium asiatic
gagagcactgatgtcgaagacttgttcattgctcacatttctggaatggacaccctggcccgcggactacgaaatgctgccaagttgattgaggatggttctctcgctgagcttgtgcggaagcgctacgaaagttttgattcggaatttggggctctgatcgaggccggtaaggctgattttgagactcttgagaagaaggcgatcgaattgggcgagccatccgtagcctcggggaagcaggagcttgctgagatgatatttcagtctgccttgtagttcaactagccaaggcaatgttaggtttattttaggttgagtaataagagatactgtcttatctgctggtaagatggtgaataagaaccgtgttaatcttgaaatcagactttatggctcagactgccccagttttattttaat

SEQ ID NO: 4148 - DNA, 410 bp, Lilium asiatic
tgcatttggtgatcgactcttgaagcagtatgttgttgcggacccctaaattcatgaggaggtgattgatggctcccttgaattcctaatccttgcaagtgatggattgtgggatgtggttacaaatgaggaagcggttgcgatgatcaaaccagttgacgaccccgagcatgcagcaaagagactgctacatgaagcttattaaagagggagcgccgacaacatcacctgcgtcttctttctgtttatgcccaaccgtgacagcatggccttggccgctcttgatttcactgacaatgcggagcttccgtaaaacccgtctcttaactgtttatctgcgtctgtaattaatgttaactcgaattgcaataaaaaaatactggttctgctcttttagacaacttccctta

SEQ ID NO: 4149 - DNA, 416 bp, Lilium asiatic
  modified_base (396)..(396): a, c, g, t, unknown, or other
gccaccgccgacaacattcgcaggggtcgaccggcgagaacaccaaatgggcaagggaaccggaagcttcgggaagcggcggaacaagacgcacacgctgtgcgtccgctgcgggcggcggagctttcatcttcagaagagccgatgtgcctcctgcggctaccccgccgcgcggatccgcaagtataactggagcatgaaggcaatcaggaggaagactacacgaacaggtagaatgaggtaccttcgcactgtggcaatcacgttcaagagcaatttcagagaaggaactgaagcagctccgaggaagaaagctgctgcatctacaacattttgagctgttagtggatttccttagttgagatcacgctgctcttcagtttctgctttctgttntatctggatcttattatgag

SEQ ID NO: 4150 - DNA, 420 bp, Lilium asiatic
cccacgcgtccgcccacgcgtccgcaagtatacaatagctatgatgggatatggtcctgaagataaaaatgctgtactggagctgacctacaactatggagttactgaatatgacaaaggaaatgcttatgcacagattgcaattggaaccgatgatgtttatcgaacagctgaagcagtaaaactatttggcggaaagatcacccgtgaaccaggtcctctacccggcatcaacaccaagattactgcttgcttggatcccgacggttggaaatcggtgtttgttgacaacattgactttgcgaaagagctggagtgactgcctagcatatgtatggtcttctccggtatgctactgtaagggttatctgacctcttactgttcactgtacactgcttttatatatattctgaatcggg

SEQ ID NO: 4151 - DNA, 419 bp, Lilium asiatic
gccagccgccgccaagtccagatcggagtgatgttggtgatgttttatcactcatcttgaaattgggtcttaaggcttagatgaatgtcttcgtttgagtgacataagaaatattggggtcaaaacataccctcaatgaactcccataccagaatatgtttgcccagcagactcttctttcataagatgactggttacggtttgtgaagttatatgagaagagacaataacatacacaatgatatgacatgaggacattataaataaattaaatgcaaaaacaataataggatatgtcctaatgtatcaagaaataaattgcttagatcttgcgctgatactgtggtggttttttttgatttgttttctattgtcaatcatagtttatgtgccaccaatgagaaagtcaatgacaagta

SEQ ID NO: 4152 - DNA, 407 bp, Lilium asiatic
cccacgcgtccggaaatggctgatggagctgagaaaaactgctattcaagtttccctcgtgttactcttaatgagcggatcctttcttccatgtcacgaaaatctgttgcggctcacccatggcatgacttagaaattggaccaggggccccttccgttttcaattgtgtggttgaaatcagcaagggtagcaaggtgaagtatgagctggacaagtcaagcggtcttatcaaggttgatcgtattctttactcgtctgttgtctacccacacaactatggcttcatacctaggactatatgtgatgatagagatcccatggatgtactggtactaatgcaggaacctgtactacccggttgttttctgcgtgctcgggcaattggccttatgcctatgatagatca

SEQ ID NO: 4153 - DNA, 282 bp, Lilium asiatic
cggacgcgtgggcggacgcgcgtccgcgccgcctgaagcaagagaggtccagcgagaggggggagctcgatcgcccgaagatgagggcgaattggaagaagaagaggatgaggaggctgaagaggaagcgccgaaagatgaggcagcgatccaagtagatcctgatgcagcggccttcatcatgtggaagatagtcgatggtcttacatcttgccggtctttcatcttgctgttgggttctctgttgatgtctaacatctaaatttcctggtttgcagcttt

SEQ ID NO: 4154 - DNA, 414 bp, Lilium asiatic
gcctcgtcggggtcggggtcgccaccgctgtcgggatcgccgccgctgacaaactccggatccgatgaggaccttcaggccgtgatggaccagaggaagaggaagcggatgctgtcgaaccgggagtcggcgcggcggtcacggatgaggaagaggaaacacctggacgagctgatgggacaggtggcgcagctgaggaaggagaacggtgagatccttgccgcgctgaacgtgaccacgcaacactatgtaggagtgaagggtgagaattctgtgctcgaaacacagatgatggagctcagcaaccggctgcagtccctgaatgagatcctgcatttcattggtggtgatgtcggcgatggattgatgtttgacactgctattcaagctcaatggaaccctaacaaccagatg

SEQ ID NO: 4155 - DNA, 418 bp, Lilium asiatic
caccctcacgtttcccaaccactactccattgttaccggcctttatccgccatatcatgggattataaataactattttgttgatccagactccggcaagctgtttacgacgcgcagccatgaggcgcactggtggctcggggagccgctatgggagactgctgtgaggaatggactcaatgctgccgcctacttctgggctggctctgaggtgatcaagggcaactggacctgccctctccaattctgtcccaaatacaatggctcagtccccttcgagcagcgtgtcgacactgtcctcagctactttgacctccccgccagcgagattccctccttcatcgccctctactttgaagacccggatcaccagggccacaaggtcggccccgaccacccccaaatcacctctgcagtc

SEQ ID NO: 4156 - DNA, 324 bp, Lilium asiatic
gcgttcgatcataaactacctcccataccaaaacttgactccgtgaaacaagaagtatatcgcgagcaagtatatattctaacctatatccaaactactattcattggtccacaacttacaaacttgacaaacccaaaacgttcccaactccctacaatacaacaactaataaattctccttttgtcaaaagactaaatatgtcctcacccaatactcatcgcaacattctctaattatatatgctaaattatacattcttcctaccctctcattaatcataaagcacgccgcttttacatctataatataattaaaaattttt

SEQ ID NO: 4157 - DNA, 417 bp, Lilium asiatic
ctctaattttaatggctcttctgcttttgaggcatgcattgaccatcaatagtgacgatggagatgatgatgcttctgcttacttttcccttttcttgctgcgggctgctggatttttgttgccttgctatatcatggcttgggccataagtatcctacaacgtcggagacagagacaggaggctgctgctctagctgccagcgaggtggcgttcatcctgcagtccagtcaggcaaggggtctgcagttcaccatcgcaccggaatcgccagctaccccccagcaagaaccacatcaataactgctgcctttactatgttttcactgtgttgtatttgctttggtgaggtgatgtttacagggctggtggtgcatttaccccctcccagttttattaggggtttgcaacctctttt

SEQ ID NO: 4158 - DNA, 417 bp, Lilium asiatic
gtgaaagttatctcgccaggaaaagaccagtttatgaatgcaccgatgtgcaggttgatgctgctaaaggttttgttgcagttcttacatcctatcttgattctctttgctcgaacttaagatctcatactatcacaaatgttcaatccaatgatgacaaggtctccttgcttttgagagagagttttattgattcttttccttaccgtgaccggccctttatgaagctttttgtggacacccaattgttctctgtacaaacagacttagttctctcttactatcaaaaggattagagctgccattctggtggttcggtacaaagaaaattggatcatgaaactgatacatgtaatttatgtgtttatgttagttatatggtaatcagttacagtactgatttatttattttttttc

SEQ ID NO: 4159 - DNA, 405 bp, Lilium asiatic
gagattcgaagtgcgttggatcttatgcgcagaggagaaaatctacgatttgaggatgtctttctccttgacccgtctttactgtacgggggtgccgacttgcacgacaggcacagggacatgcggcttgacgttgataatatgtcatatgaggaattattggcattggaagaacggattgggagcgtaaacacaggattgagcgatgaagtagtttcgaagtacctaaagcaacaaaagtatttaccgatgacggtggaagaatcggtggatgaagaaccgtgctgtatttgccaggaagaatatgttgaaggacaggatcttgggacattggattgcgggcacgacttccacactgcttgcatcaagcaatggctgatgcagaagaatttgtgccccatctgt

SEQ ID NO: 4160 - DNA, 308 bp, Lilium asiatic
tcgatttctctttttcatataactccgtgattcatttctaatgctcgcaacttattaaatggctcgccgcgttttttattcctagtgagcaacctttttataatacgagtttgttcatattgtacttgtactgcttacattataggattttgtattttatcctttgttaccttgttttaagttctaatactcttactgttattaatttctactttttcatgatgtcactttattatattttgtggaattcatatcttatactttttaatacattctttttttttatgctctttaacttatatttcttt

SEQ ID NO: 4161 - DNA, 365 bp, Lilium asiatic
gcctgaagcaagagaggtccagcgagttatctgagctcgatcgcccgaagatgagggcgaggtggtagaagaagaggatgaggaggctgaagaggaagcgccgaaagatgaggcagcgatccaagtagatcctgatgcagcggccttcatcatgtggaagatagtcgatggtcttacatcttgccggtctttcatcttgctgttggtttctctgttgatgtctatcatctaaatttcctgttttgcagctttagtaggttctaagactttaaatgttatgcttttgttgacaatgtgtgagacaatggtgttgaaccatatttgatcttttttgagatgtataatgttgaagcgtagttatttct

SEQ ID NO: 4162 - DNA, 420 bp, Lilium asiatic
cccacgcgtccggtttctcgttggtatgagaccgtctcttcagctcttgcagtgaggtttcctggcaaggctgctggagtgaatattggtggacaagttccaccgtcggaacctgcaccttcgtctgaggctacaaaggtggtggccgaagaagatgatgatgatttggatctctttggtgatgagactgaggaggagaagaaggcagctgaggagagggaggctgctgtcaaagcatcctctaaaaagaaagagagtggcaagtcctctgtcctattggaggtgaagccatgggatgatgagactgacatgaagaagttggaagcagcagtccgcagcattgaaatgcctggtctcttatggggtgcatcaaagcttgtagaagtaggttatggtattaagaagctgcagatcatgatg

SEQ ID NO: 4163 - DNA, 418 bp, Lilium asiatic
ctcattgcacgcaaagatatcgatcaagattttttgattcgggaattgcaagccaatgctgctacttccgctgagcaatacttgcatgagaagacccatcttgaaggcattatcgcaaaccttgaaggttcgattggtgaactaaaagaagagataaaaaggatttcagaagatggttctctccttgaaaagaaacatatagatcaagatggtttgattcgggaattgcaagcaaatgccgccacttccgctgagcaattctcgaaagagaagtgtgcacttgaagctcgactatctggtctttcactctctcatgactcgcttgaggccgaagttgtatcattggtctctgagataacacagctgcgggctgtaagcactcaacaacttgaggaactaagccgcaatctgaacattg

SEQ ID NO: 4164 - DNA, 418 bp, Lilium asiatic
caatatgtgaatttgaagaaaacccaaaatacttgaagaattaggttttctccccgagaggaatcatttagttgtccgctggactataaatgagatctgttgtcagatgtgttgtagaatggtggacacgtctatctgctctgtatatgtcagttcaaccgtaagtcgatgtgcaaaatctattctagcactgaagtcacttgtcttcgtgatgaaaagcatgcagaggtcacggcggctggttcagctggttcataaagagagaagattgtcggcggacttgttcgtagagtcaagatagttctcttcttacttaggaacaaaatgggcaaaatgagctaagttggagatagtatttcaaagcaggttgtgtctgatgactaggcggaagcttcgttaaatataagataatggtcac

SEQ ID NO: 4165 - DNA, 392 bp, Lilium asiatic
cccacgcgtccgggaactcggcggcgtttgcgttcgaacaggaggtgaagaataatgagtggggcacgtgctggatacttatttatttatggtcctataaaaatactctcaccaaggagggactaacttaaaaataacattttttatgtcccaccagcctttgcaggacaagcatacaagataaactgaccctattgagttgccagctgcactaaagaatggggagtcatcggaatctctcggatattctacgaatattccggatctagataatacttgcaagagaatttttaatagactaaaatggctatataatgaatctttttcaaattgatattgtttgtattactttttttggattcagttcaacataatataccaatgttggggac

SEQ ID NO: 4166 - DNA, 245 bp, Lilium asiatic
cgactaccctgcgacaatgtggtaggtctgcatctgacatgacttgctgtaggggaaagtaagcttaaagcggctaacttttgtgtctttaaaaatgagttgcttgtttgatttgtataggctagtgaggctttaattgtgttatgttatctctctgtattttgtaatatttagcagtgtggttatttatctctttcttccccaataaaaaaaaaaaaaaattttatttaaaaaacattttatat

SEQ ID NO: 4167 - DNA, 339 bp, Lilium asiatic
gcgatgactagcttctccgtcgcatctttcatggccctcagcaaaatcgcctgcaagcgccgtccattatgagctggtggagtggcatgtctgctccccgtctggattcaagcacaaggtgactgacaatctccataggtggataattgatgttaccggagcgccggtgacgctgtatgatggtgagaagtaccagctgcacgtgtatttcctatatcactatcccatggatgcttctcatgttatcttcattaattctgtaccgattcactcacatatttacagcaatgggcacatatgttttattatattcgggatgacttatgttcttcctgttat

SEQ ID NO: 4168 - DNA, 414 bp, Lilium asiatic
ggcccttatatttgtgacacggtcgcgcagttggtcgtttgttgagaggcctggattgttgctcgttgcggctttcatggtcgctcagctgatagcgacacttatagctgtgtatgcggactggggatttgctgcgatcaaagggattggctggggctgggctggcatcgtttggctctacaatatcgttttctacatcccgcttgatatcatcaagtttattatccgctatgctctgagcgggaaagcgtgggatctcgtcatcgaacaaagaattgccttcacaaggaagaaagatttcgggaaggaagcgagggagcttaagtgggctcatgctcagaggacacttcatgggctgcaggcacctgatagcaacatgttcactgaaagcaacttcaccgatctcaaccagat

SEQ ID NO: 4169 - DNA, 419 bp, Lilium asiatic
ggctgcagaaagtgatgttcttgtcctgtgctgtgctttgactgatgaaacacaccatatcatcaacaaggatgtcatgtcagccttaggaaaggagggaatcattattaacgtggggcgcggaccccttatcgatgaaaaggaaatggtaaggcgtctgatgaaaggcgaaattggtggtgctggtcttgatgtgtttgagaacgaacctgaggtgccagaagagctctttaccatggacaatgtagtattatcgcatcatagagctgttttcactccagaatcattagcaggcttgattcaatcgatgaaagggaacctagaggctttcttctcaggtaaaccgttactttcaccagttttagactaaatagaattcgacccgctttgacaattatcaatacaacatagaatatgaa

SEQ ID NO: 4170 - DNA, 412 bp, Lilium asiatic
attcaacagctatctttcccaggattcatgtaaaggatccatacagacggcttggaataagcagtgaagcttctcaggatgaaattcaagctgctaggaacttcttgataaaaaaatacgcagcgcacaagccaagtgttgatgctattgaatctgctcatgataaaataatcatgcagaaattctttgaaaggaaaaatcccaaaattaacttgaagaaaaaagtgagggaagttacccaatcacgtgctataaaagcagtcacaaataggtttgaaactccaacaaggaatgtcattataaagacaacagttgcattcttagctctcggaatactcactgttctgtttccaactgaagaagggccaacactccaagtggcaatttctctcatagtatctatatatctgat

SEQ ID NO: 4171 - DNA, 418 bp, Lilium asiatic
aaataatttttgaagaaggaagtgagagcaatgcagtctggaccaggcgttttcttcactggagatgcaacgggcgaattgaaagtgtggaagttgtcgacaaatgagacgcccgccacatgatttgatgagcattgcccactgtaacttatattgctttttctttctttccatttcccatttaattcgggaagcacattgaactgcatttgaagggagatgggcatatttggacagaatggttttcagagagtgagaagtgattccagtcacttttggtctgtttgagttgaaatggagagcctcacagattgtgaccttgtgacattattcagtgcaataaaatcagttctcacaaacaagcagcgatatttgtgaaccgtgcgagcataacagtagctatttccgtagtaccttt

SEQ ID NO: 4172 - DNA, 321 bp, Lilium asiatic
cccacgcgtccgggccatggcatgctggggcttagtatgtttggccagagcatgttacggcgctattattttttggcccgagcatgatgttacctagcatttttaatttatacaggagggcctttggagagcccagtgatggatttattcagagtgcacctcctactatgtctagtgggccaattatttgatgagataacatctgtttatctatgataaggttggtgatttgccttattctgagcataaatatatctctattaaacatttcacattttctaaataacctgatgaattaactgaatctttggattgtgtttt

SEQ ID NO: 4173 - DNA, 57 bp, Lilium asiatic
cccacgcgttcgcggacgcatgggtcctcacgcgttccctttcttcgaactttcatt

SEQ ID NO: 4174 - DNA, 66 bp, Lilium asiatic
gtccaccatagccagactgcttcctggcgtaccgccgcttaccttgcacacagagaagattggggt

SEQ ID NO: 4175 - DNA, 93 bp, Lilium asiatic
ggcatgaagagcatcaccctcctcatctactatgtgacccgcggtgtcctgaaaatcgggggggttaacataatgcgcgatgctctcacctac

SEQ ID NO: 4176 - DNA, 320 bp, Lilium asiatic
gcatggtggtggaggaaatgcactgaccaaggctccagggcccagttgaactagtaccggcggccattattagcacccgctcccgcactatatgctgccgtggctcctaataaaaccaattaataacttatcttaagttgtgctcctaataaatccaataattatctcacctcaagttggtagtatctgcttgattaatgcttatattctctctttgggtatttgcatttttattattatcatcatgggaccatttttataagcctttattaagatacatttttgattcttataaactgtaatttcttttcattattttg

SEQ ID NO: 4177 - DNA, 280 bp, Lilium asiatic
tttcgccacgtccgaaagcatacaacgtgttgtttatttcgccccactctgatgcatgtggccgtacattgcttcttcaagttaatgatgttcaatgtttacaaataagaaaggatggtaaatgggttccggttgaacctatcgtctaagcttttgttgttaacattggttatgcttttgaagatattgttcaacggaaaatatataagcatcttatcttagggtaatgataaataccttaagagatcgtttttttgttgttacattttattgacctata

SEQ ID NO: 4178 - DNA, 404 bp, Lilium asiatic
atcgtcacatatatgtctaggagaacatctaaagtaatggtattgaagacatttgaagtggaggttctttagaaaggttcccctacctataaattattccaacaatcagtaatctattttcttaccctgaaactaagaataggtccccagtacaaatcttttattatgtttgatcgaatatgataggaattaaactaaagtatccctggtattttgactaatagtgggagacccttttaaaggtcatatctcggatgttgacccctggtatatagagaccctattattactagttcacttatatgcttaaagaaagaaaaaattaccaaaagtcatcagaacacaccaaaatgattacaaatgaaataaaaaaaactctttgaaaagaaaataaaattgactgc

SEQ ID NO: 4179 - DNA, 245 bp, Lilium asiatic
cggacgcgtgggtatgaatattacatctatgtgtagggaagttttaacaaattaatcaatatagatgaaagaagaaataaatagttggtaattatatcttctcttttgccttcttttatgaatatttccataagagaatacaatctcaagtactactccgatccttgtggtctagttagtataattagtagctatgaatatataccttacatggtttgttatttatgaaataatcattccttaat

SEQ ID NO: 4180 - DNA, 288 bp, Lilium asiatic
  modified_base (12)..(12): a, c, g, t, unknown, or other
cgctcgactgtncgaagcaccatcagggaggcgctggaggacgtcaccgccctcttcttcgatgaggataggaacgagatctatacgggcaataagcaaggcctcatccatgtctggtccaactagcatatatcctgctacttgtttatgtattcattggcttgtgtgtcttgcttgtagctttaatattaattatgtagaattgcgtgaattattattaatttatctatagtggggatgtttgtaagttttaccttttagtgtgcttgtcgtagcatattatcctgc

SEQ ID NO: 4181 - DNA, 236 bp, Lilium asiatic
ccttggtgcatattcacgcaagcaccgtatgatattaaacagacaatggactaactggatggtattgagaagaaacaaaaatgattatctgtaatttatatcttgtgctacgttttaatttgacttgttggtttctggtctgcaaaaatgtattaatggacaaattggtgtggatgaatccgaaaacatgaatcttttataagttaattggtaattcgtgacccaagccattattt

SEQ ID NO: 4182 - DNA, 249 bp, Lilium asiatic
cgccacatggctgcgaccaagtaagaggtggatgtccttaaccaagtagtaggtggatgtcggttttatggtggtgtagggtattgtagaaaataaaaatcggcttcatggacttggagcatttatgctgagggaacctttgtttaatagtttgtatgggcgtcaggtggtggcccgcattttggatcggcttttgtgaaaagctgtttaaaactttgaatatggctggtttgagagttttaagttgat

SEQ ID NO: 4183 - DNA, 416 bp, Lilium asiatic
gaatgtttcaggctgttggtcatgatatgttttcctttttcctggacgaagtaagaaaggtggcgtgaaagatctttcaactaccgatggcagtgaaaaagaaagtcagcacaggacaaggtaatgattttatgcagggatatggaaatgagcgtctcgtaaccgatgaccaaatccttgattgggttgaccgtctatatctactagtacaacctgaagatgcgaggaaattataacttttgccagataaccccactaattttagtgatgtcttacacgaatatactgtgaagacaaataacctatctgaactcgttgcttagatccatgtctaaattgttggaactggttgaaaactacttgagtaaccaattctgtgtctaggcctaattgtttgcttgattcaattacttccc

SEQ ID NO: 4184 - DNA, 409 bp, Lilium asiatic
gaaaaagaacaccctaaaagagacgttgggcaagtggatggcacagatgatgcggcgggactgtacggctatgatggattacgtagccgctaagtaccttgctgaccaaggaagtgacgcgtgcactttacgccaaagcaccttataaaaaggcgggagatctattggaaaaggagagtctggctggagagccagaaggtggtgctgcgtccaagtcctctcacacgggtgcagcacacgtggatgctttggagccgcagaagtcctgcttgtctttggtttgtaagcttgctttgtaagtgtgttggagattactttggtgctttggatactgcttgtaagtttgggtagttaagaattgttctctgtgtgtgttactattacttgcttgctggtttgtaataacctg

SEQ ID NO: 4185 - DNA, 292 bp, Lilium asiatic
  modified_base (36)..(36): a, c, g, t, unknown, or other
  modified_base (86)..(86): a, c, g, t, unknown, or other
  modified_base (93)..(93): a, c, g, t, unknown, or other
cggattgacaaacacatgtatcatcgatatgtatantgaaagtgaaaggtaatggtcttcaagaacaaggagggtgtctcatggangagcatnccataacgtccaaagcttgagaaagcaaggagagaagaaccttggctcgatcacgttcgaagacgaagagggcaaatgagcaagggcagcagggaaaaggaagcatgctatggagagaggaagcggttggcccagggtccaagcgcatctgtagctcctgcagcaccacctgtggcccaacctgccgaggctcccaaga

SEQ ID NO: 4186 - DNA, 411 bp, Lilium asiatic
  modified_base (343)..(343): a, c, g, t, unknown, or other
gtccctttccccatcctcaattctctcagatctctcactaatggcgcccaaggccgagaagaagcccgcggcggagaagaagccggccgtcgaggaggagaagaaggcggttccggcggagaagaagcctgctgagaagaagccgagggccgggaagaaggtcccggcctccaaggagggggcctctgacaagaagaagaagaggtcgaagaagtcggtggagacctacaagatctacatcttcaaggtgttgaagcaggtccaccctgacatcgggatcttcagcaaggcaatggggatcatgaacagcttcatcaatgatctctttgagaagatggctcangagttcgcccgccttgctcgctacaacaagaagaacaccatcacctcttgggagattcagactttcgt

SEQ ID NO: 4187 - DNA, 241 bp, Lilium asiatic
gtgcacacaccgatgctggcggcctcatccttctgtttcaggacgacaaggtgagcggcctgcagctgctcaaggacggtgagtgggtggacgtccctcctatgcatcactccatcgtcatcaacctcggtgatcagcttgaggtcattacaaatggcaagtacaagagcgtgctgcaccgagtggtgtctcagccggacggtaccaagatgtcgattgctttcttttacaacccaagggg

SEQ ID NO: 4188 - DNA, 420 bp, Lilium asiatic
cggacgcttgggcgagaacagaaatctcgtgtggtacaaaatggttaaagctcgttgggtggtgttttccagaacgaatacttaaccttgaaagcgtggcctatcgattctttagaccttttgagtttgaagctagatgtgttcagaaaagtttaccactgggataactgtcttgttgctatcaatctttcatagcgacgtttctttttgatccttctattttggatctttctatctaagtgaaacatatattaccaatttgttgatttgtcacccaccaatatttatacttatctggtgttatacctttttgagacatgttatttttatcctacttatgaccgatccctctttattaatttaactctatacgaaatgaaccctttattcatataatttgtcatttttcttgtgttaaaa

SEQ ID NO: 4189 - DNA, 465 bp, Lilium asiatic
aatgctctgaaacagtatacctacgacgatcaagagagcttcttcttctgacttgcatagggaggaagggatgctacgcctcggttaacgatcaaaagaagagctaagggccgtctgtcacagttcaacagtctagatgcctccacagtactctctacactactgtgcttgtcttcgaccatcgagaagggctgacaagtttgaagcacgtctcttcccccaggtctgagtgtccaagatctgtgaaggtgaattcggcttacatttgcttccgttttcaatatctgcttgtctttgttttaagtcttgagttttgatgtggattttggaaggggatatttcatcttctatgacaaatctgtttgtgagatgtgatctgcctgcaactgttttgttaatgttgaactccaacaatttagtttaagggtgtcatcggtgggggtgaaagtagatcaaacaatgttt

SEQ ID NO: 4190 - DNA, 179 bp, Lilium asiatic
gtcatgttcgggtcatgtttgtgtttatgagcaagatttggaatgtattttaaatgctgtgtgattgtaaataaagactcctttcttttcataccctctactttggaattaaagcttattaatatcaaccgataggacataccctttactttggagttaaagttaattaatatcaaccg

SEQ ID NO: 4191 - DNA, 298 bp, Lilium asiatic
cgacggtcctaagttccgtcttgaactcagtgtccctgaggcgctggcgctgctagacatgtttgctgaaaacaacgtttaagctgtttccccctaggggaaagttgtaagttgttacatcaatgtacttggttcttgatactgcaagtgaatatatttcagttgtcggtcgggttggaatcagctgtgaacctggctagatactttaagtgtaatgtatgatgagattgcgaagttgtggagctgtctcgttgtaataaattttattgttattaattttgaagttttgtttgtgaat

SEQ ID NO: 4192 - DNA, 388 bp, Lilium asiatic
  modified_base (314)..(314): a, c, g, t, unknown, or other
  modified_base (348)..(348): a, c, g, t, unknown, or other
ccgatggatctgggaagtacactaacgctcttggaatggagctcgatctctctgagaaagggctggggctgcatatccacacgtatgcaatcctcgatgacgacaccaaagttcatggatgcaaacaatgaccatgctggggaattaaattgttacggtgcagatgagatccatatggcactgctatctagacattgttgtagtccaacattgcctattaattatgatgggctctgttatgaactatatactgatgattctatagcatatgaacttgatctcgaatattgatttgaattggtgtttgcggtcgntctttgaagtttggcctatgggccttatcttttnggggaataaaaagatatgagttaagatatcttgtttggtt

SEQ ID NO: 4193 - DNA, 314 bp, Lilium asiatic
gtcagcccatccaccgattgctctaaggtgcgttgagccaatctgctacttttgctgcttaaaaatattgttcggaataatgcagactttgtttctgtacaaggtcgtaccagtgttcattgagggtgtgatgtcgttgctgtttttctatatttttatgttgctttttcagcccatattttactgctatgtaacattgtggtgtcgtaccattgcctatgaagtatgagttgctggttaccataagtcaaagcactctttgtaatgcatgttcagtttatgaggaatatcaatttgaattggtctttacggcc

SEQ ID NO: 4194 - DNA, 244 bp, Lilium asiatic
gacccactgcgtccggttcatcccatctcacctattgctctaatgtgcgttgtaaccaatcatgctacttttgctgcgtggaaggattttatcataataatgcattactctgtctctgtacaatgtcataccatctttcaatgaatttgatatatcatcagcttttttatctatatataatctttgctatttcatcccatatttcacttctatattactaaattttgttataccattatctatt

SEQ ID NO: 4195 - DNA, 357 bp, Lilium asiatic
gttaattaataatatatttaagtcatggtccgagtttcacatttgttctcaaattgagcaggagtgctaagttgtattctcccgcttattatgcacttgatataattgtcaatcaaaatctcttgcttagaaaaaaaaaaaaaaaaataaaaaaataaaaaaaattatataaaaaaaaaaaaaaaatattttattattaataaaaatatattatattaatattttaataatataaattatatataataaaattggggcggccttttttaaaaaatcaaactttattaccccttctattaaattaaatatttttttttatgggccactaaataaaaataaatggtgctcctttttaaa

SEQ ID NO: 4196 - DNA, 165 bp, Lilium asiatic
gtcctacatcgagagccgctatatataatgcatcgagcgaagggacgggagcgggctaccgggaggttgtctgacatggtcatcgaaaactaattcagtgggccagagttgacaacactatgactgggtgaaccttagcgtggctcggctcaggagactcacaaa

SEQ ID NO: 4197 - DNA, 424 bp, Lilium asiatic
acgcactctacaccgcacgcatctggacgcttcccctctccaccgaaaccctaaccctaagttctcgcgatgaagggagtcaagccgaggaatcgcaccgtcaagcctgatgacaagctgggggctaagcggaagggcgccgacaaggtgagcaggcaggtgaagcgtgccaaggctggcaaggaccccaacgcgccgaagcgtcctccgaccgcgttcttcatcttcatggatgatttccgcaaggagttcaaggagaagaacccgaacaacaaatctgtggccactgtgagcaaagctgggggtgacaagtggaaatcgatgtctgatgctgagaaggcaccctaccaggccaaatctgagaagcggaagactgagtacaacctgaagatggatgcttacaacaagaagctggacggagatg

SEQ ID NO: 4198 - DNA, 175 bp, Lilium asiatic
gttgcattaggggatctgggagtaagagtgctactgggatgatgaaaggagagtgtcataggtaactttggattgtgtgacgtacgaattctaaatttcatttttttaattatataatatatgaatattgatcaaaaaataaataaggaaatcatgtatataaatcaatgaaaaa

SEQ ID NO: 4199 - DNA, 410 bp, Lilium asiatic
gaagggccggggcgacccacacgtccggtccctatcaccgattcttctaagatgcatttcatccaatctgatacattttctgcttagaaatattcttctgaataactcacactttcatatcttacataatcttaccaattataatagatagtaatatgtctcttctaatattttatattcttaaatatctattttcatctcatattattacttcaattttactatatatattcataccaattcctattatatattaattgcttgttatcaaaatataaaatactatttaaaattcattatctatttaataatatatattaatattatatcaactcttctcttcctctataataatattaatattattttttatgctaatattatatttatattatttttctatctaaatt

SEQ ID NO: 4200 - DNA, 411 bp, Lilium asiatic
cccacgcgtccgcccacgcgtccgcccacgcgtccgcaggcaagcaagcaactaaatgaagagcaactagcctctctttctagtgaaaaggtactaaatgagtacattgagcatcagagggagaatataacgactataataaagcagatgttagctgttggggagatatttagatgtgaaaatctgcagtttccaacagaggagctggtcaaagaggttgagaaatcggtagctgaattcaaacgtcataatcaagagtatgatgaggagcgtgttaaagcccacgtgcaggacatcctagagggggcaaaggttcttgaatttttgagagagaatgctgacatccagtatgtgaatagataagatgacttagagactcatagtgaactgaacggtaccatatcctgcaaa

SEQ ID NO: 4201 - DNA, 252 bp, Lilium asiatic
  modified_base (82)..(82): a, c, g, t, unknown, or other
tattactagagtgagccgcataggggtctatatatggtttaatgaatgtaacaaacggagggagactattcactcaatcttntctgattgtatggtgccgaaagaaagtcgactctctattgtaactatatcaggaactgtatcatagatgcttgttggtaacaaaagtggacaaggatgcttgatagagccgtcacaaataaagagggatttgactttgccatgggagtgcggatgcctgtttttagaatg

SEQ ID NO: 4202 - DNA, 454 bp, Lilium asiatic
aaaatcttaagcgagaagtaatcagctagcttaacgcaaggcgtgcaccctgagagctctagttctcttgccttccacggaggtcttgcaaagcaggatcgcaccatcgcggcggaactgtctggtatagcggagttatcagttggcccgtgagaagtcgttgactcgagagctaacggggtctttaagcctttggagagcacatattcataattataatttttttcgtacttggtttaccaaatatgtgttatgaattggccaaaaggagcacgagggcttcgacgaagtaaataagccgctgccttgaggtttgttcaatttgccatcttgcactaagttacttacgttacggatgtcgtttgcagatagtaggtctctgctgctcctgttgctctgttggaacctccaaaaactttcctgtgattgggcataagataaaccgaatctgacc

SEQ ID NO: 4203 - DNA, 307 bp, Lilium asiatic
caaaattaatttttcttaatttttaccatgagttggtaaaacatacccatgtaagaatgaacacaaattttcatctccttaacacctctccattatgttatatattattaagttattttgaaaattgttagagccatcaatgatttggtcatcagtcaattaggttactggtcattatatttatggcccttcataagaatatgttaatcctttacgataatagaatgtttatattgtcaaccataactactatattataaactacgcagattattattataaagctttgggttaattattatgtttt

SEQ ID NO: 4204 - DNA, 468 bp, Lilium asiatic
ccgagttcctaaagtgcaagaagttgtttcacagatctttgggaaggctccaagcaagggagtcaatccggttgaggctgctgcgatgggagctgcgatccaaggtggtattctccgtggagatgtgaaggagcttttgctcctacatgttactccactttcccttggaattgagaccctgggtggtatattcaccagactgatcaacagaaacacaacaattccaacaaagaagagtcagacattctccactgcatccgacaaccagacccacgttggtgtccgtgtgcttcaaggcgagcgtgagatggctgcagacaacaaacagctgggcgaatttgagctcatgggcatcccacctgctcctagaggcatgccacagattgaagtcacgttcgatatcgacgccaacgggatcgcgacagtttctgccacagacaaaaacaccggaaaggagcagcagataac

SEQ ID NO: 4205 - DNA, 468 bp, Lilium asiatic
cggacgcgtggggtgcaggttatgctcaatttcttgaaagagtttgaagccaagcttgacatcaagatcagctgctcgcaggagaccgagccgctgggcacagctggccccctcgctctagccagagacaagctggttgatggatccggcgagcccttctttgtactgaacagcgatgtgatcagtgagtacccgttcgcagaattgatcaagtttcacaacacacatgggggagaagccactatcatggtcaccaaggtcgacgagccatcgaaatacggggtggtgatgatggaggaggggactggaaaagtggagaggttcgtggagaagcccaagaaattcgttggcaacaagatcaacgctgggatctacttactgaacccctccgtgctcgaccgcattgagctgagaccgacctctattgagaaggaggtctttccgaagattgcgaccgaccagaagctg

SEQ ID NO: 4206 - DNA, 259 bp, Lilium asiatic
gcgatcgcccacgccttcatccacactttctcccacactttctcaagcaatcaagcaactaaatgaagggcaggctatcctctctttctagtgaaaacgtactaaatgagtacattgagcatcacatggagaatataaccactataataaaacagatgttatctgtttgggagatatttatatgtgaaaatctgcatctttcaacataggatctggtcaaaaatgttgataaatctgtatctgaattcaaactttataa

SEQ ID NO: 4207 - DNA, 182 bp, Lilium asiatic
tccacgcgtccgttcaatactggatactgatcatcccgactatcatgatcttcaagagtggcgataagaaagatgctgtgaatggaacttttccataaagttctttggttacatgcattgagaaatatgtatagggatatgctatttgtgttctatggaatttttcttttaagaactattct

SEQ ID NO: 4208 - DNA, 459 bp, Lilium asiatic
cagttccatggggcactctcccaaccatcctcgccatcgagttccttgctatcgccttcgtcgagcatcaacggaacatggagaaagaccctgagaagaagaagtacccaggcggagctttcgaccctctcggcttctccaaggaccctgtcaagttcaaggagtacaagatcaaggaggtcaaaaatggtcggctggcattgttggcatttgttggtttcgtggtccagcaatcggcttaccctggaactgggccgctggagaatttggctacacatttgtccgatccatggcacaagaacattggcgacgtcttgattccaacaaacattttgccatgagagctcaagattacagagctggttttcaccacctaccatgttgtaaaactcaatgtaatcatctgtacaacttgtattcctgacaagaatgattggtataaaatcttctttgcatctt

SEQ ID NO: 4209 - DNA, 440 bp, Lilium asiatic
cagacaaccaaactttcatttcagttcacaagtctttacaagccagttcacaaaatagaaagacatacactagtccccaacaacactaaactgatgaacgaagttaccaacgccaacccagctccttactgcaacggtcccagaaagtcagacgccaaggtccccagcatctgaaactccctatcatgctcaagccacttcatcccgagaaccttgaacctcaccttggtgcccttctccatcttcgtcaggtcgtcactcagaaacatcggggtctccccaccaaggtgcttgaaatccttcatcatcttctccgaaagaaaaatagtgtctatcggtccacacttgagaattaccccgtgcttcataaccttctccactattccgatcataacctcacctttgcaaggcttcatcgtgatacagttgaactttacggg

SEQ ID NO: 4210 - DNA, 313 bp, Lilium asiatic
ctgctcttcacattctcacagtactgctaatcattcaagcactcttgagtgctccaagtggggattatcccctgtcggagaatattgcaaagcattggaagtcaaatgaagcacaagctgtagaaacagtgaaagaatggacccgtctatacgccagtggtgcttgacgttgttatgtggagctcttttggtataataacagcttactatgaaagtgacctaatatggctgtggctactccttgccattaacatttaattaattgttagtgaggggtcgttgaatgcttacttcccttcactgttttattata

SEQ ID NO: 4211 - DNA, 408 bp, Lilium asiatic
ccaacatcctagagcttttaccttccgggatttccctggtccctgagtatgccttatcctgggtcaaaggaaagtctctaaagccttttggtcgattgtggtgggatgagacagtggctactgttgtgacgagggcagagcctcataatcaggccattttgcatccagaacaagatagagtgcttactgtccgtgagaatgcaaggctgcaagggtttccggactattataaactttatggtcctgtgaaccaaaagtatatgcaagtgggcaatgctgtggctgtgccggtggcgagggctcttggatatgggttggggttggcccgccaaggtttaggtgatgatgatcttccggttttttctttgccttcgactttttcaaaacctgcggtaaggtcgtctgtcg

SEQ ID NO: 4212 - DNA, 466 bp, Lilium asiatic
  modified_base (413)..(413): a, c, g, t, unknown, or other
agctcccggaggccgggacctcggtcacgaaaggttccagcttcggggcagtggagagtgtgaaggctaccagtgatgtgaactccccagtttctggtgaagttgtggaggtcaacactaagctcagtgaaactcctggcctgattaattcgagcccgtacaatgatggatggatgatcaagattcgaccaagtagctcatcagagctagattccttgatgggaccagaggcgtacacaaagttttgtgaagaagaagatgcgagccattagagcaccattatttgtggcttctatccatctaacttgtttcatcatatttcttctaaaaaaacttggatatcagtcttatgtgtttatcaaagtttgtgagcatgtatcgccattggatcgagatcaatatcaccctatgtntgttactttctatcatgtaaagtgtaagacatttggcaacattcatgtacttt

SEQ ID NO: 4213 - DNA, 169 bp, Lilium asiatic
tcggttgaatctaattataactattagactactgatggcagttatgaagggcttgtttgctgggtaaagagggtcctgttcatgatgttcattggtctttcttctggattggtgatcgctgtattctatgggatcatgctctcctaaacaacattgttttgacaagaaa

SEQ ID NO: 4214 - DNA, 444 bp, Lilium asiatic
aattgaaccattttttactttcattggagtacttgttgtatgtgtggatcgtatatattttttttgtgggtggtgttttaatttaatttataatttatatttttatatattgtattctaatttttttttttttgttttataattttttttttattatttttatttaattttttttttttattttttttttttttttttttttattgttttttttttttttatagttttttttatttgatattttttttttattttgttttttatttttattttttgttttttttttgtatatattttttattatttttttttattttttttcttttttattatttttttttttttttattttatttttatatttattatctatttttatttttctgattttttttttttttttttttattcttttttttgttaattatattatctttttttttt

SEQ ID NO: 4215 - DNA, 464 bp, Lilium asiatic
cggacgcgtgggcggacgcgtgggcggacgcgtgggcggacgcgtgggcggacgcgtgggggagaataccatataatctcgcactgaagcggaaccatggtgcatgtgcggctcttctaaacccatcatcagcggagcctttggtttggcccactccattaaagttcatcagtgaacttgatccggaagcaaaggttctattggagacggctctaatggaggctaatagggagagggaaaaacaaattttgaaaggaacatcatactcttttccgtcccccgtgcattcagatgccgatatcgaagatacactctctgagtccggtgacaacgagctttgttgcatctgcttcgaccaagtctgcaccgttgaggtccaagaatgtgggcaccagatgtgtgcgcactgcacattggctctttgctgccacaacaaacccaatccgacaaccttgtgcttgact

SEQ ID NO: 4216 - DNA, 454 bp, Lilium asiatic
ctccgcgcatcaggagctcgcgtccggtcgccgccgcgccgttctcagatctctcatggcgagggtaccagttaacccaaagcctttcttgaacaatctgactgggaagcgtgtgattgtgaaactcaagtggggaatggaatacaaaggttatcttgcgtcagttgactcatatatgaatttgcagctggctaacactgaggaattcattgatgggcagttcacgggaaatcttggagaaatacttataaggtgcaacaatgtactgtacctccgtggtgttcctgaagatgaagaaattgtagatgcagaatgacgtccggcaagatccttatgactctgtttcgtatcattaaatatgtttgcttaatatccactggttttattgtaaatcatgtgttgcattttcgacttgatgctctttctagaacaatatgcttgtgtatttttgatt

SEQ ID NO: 4217 - DNA, 367 bp, Lilium asiatic
acacgtcaacattgcctctttctagtgttaattcctttcccaaaagcgataatggagggccaactatgcagcagcaaagaccttctgtacctctggcttcaactaatcaatttactaatgcactgtttgctgcaccttctgttggagctgtaaatcaacgatggggttctccaccggcgacaaactttgaagcagcattgacagctccaactggatatccatctcaagttgcacctataccacctcaggaaatgaatgtcagtgttctgtcacaaccacctgtagaggctaaacctgttggtagaaatgctctcccagaggatctttttgcttttctttattcatcggcgcctacattagtttcagt

SEQ ID NO: 4218 - DNA, 297 bp, Lilium asiatic
tcgcgcctccattctaagcaaatcagctatgtctggtcgaggcaagggcgggaaggggcttggcgaagggctgcgccaagcgccaccgcaaggtcctccgtgacaacattcagggcatcaccaagccggcgatccgccgtcttgctcgccgtggtggctgttaagaggatcagcggtctcatctactaggagacccgtggggtgctgaagatcttttttgagaatgtcattctctatgctgtcacctacacctagcatgcttggcggaagacggttactgttattgatgtggtgtat

SEQ ID NO: 4219 - DNA, 407 bp, Lilium asiatic
  modified_base (376)..(376): a, c, g, t, unknown, or other
ctcgaacctgccgtgtttgtggcaatccgcatgggctgatccgaaagtatggactgatgtgctgcagacagtgcttccgtagcaatgccaaagaaattggttttatcaagtatcgctaagggggtttcaaggctggactctggtttagggaatactatgccatgtaggtctgattgcttagtaacaatgtcatcatttagtgctgctgctattaaagtttggttatgttttcgtttgtactgaggaattgtgtgctttatttgatacttgttaagcttattttatcggatttgtggtaaagaaatctgttattgagacaatttgctgctgaaattaccttttgttattctgaatgctaaccaatgtgatatgattntattttttgtaatcttaagcctgatatgttg

SEQ ID NO: 4220 - DNA, 250 bp, Lilium asiatic
gatctattggtcaaaatgttgtcttaaaagggttggtttcagtcaaagaactgctttctagtggacagattatttgttattagtcttattatttttctcaagtaataaaaactgtataaatgtacagattttcaaagttggacaagctgtggaactttatgtgattaaaaaaaaaaaaaataaaaaataattaaaaataatataaataaaaataaatgatagtccattttaaaatatatactatatttaa

SEQ ID NO: 4221 - DNA, 422 bp, Lilium asiatic
ttttcccagaaaggattatgtcatggatttgtattttggattgattgggtgttggatgaaggtaattccattgttgtatcaactgggccagatagcagatactggaaacaaggagtgaaactcctcagcaagcctatgatggtcaatgtaggtgaatgttctgcagagattgaaacatcttttgagccatcaactggagaattgatcattacttcctctttctcattatcctgacatttgtaagcctatttgtgccattatttattttggtaattgctattttagtccatcaaattagcatagaagatattctttggatttgaataagttttgacaatggataaaccttacacttgataacacaaatatttgtcaatttttgttattttaaatattaatttttttttatttttttttttata

SEQ ID NO: 4222 - DNA, 468 bp, Lilium asiatic
ccccaatataaccccctccatcctttcccttcttatcccaccatccccactcctctcggacattacccattttgcccctctcgaaaccctaaccctaagagatgaagggcgcgaaatcgaagaccgacaccgctaaggtcaccaagaaggccgaagccaaggtggcaccgaagaggaaggcggcggagaagccgagcaaggcggccaagccggcgaagaaggggaaggccggcgttgaccccaacaaacccaagcgccccgccagtgccttcttcgtgttcatggaggagttcaggaaggagttcaaggagaagaaccccaacaacaaggccgtctctgctgtgagcaaggctgggggagacaagtggaaatcgatgtctgatgctgataaggcaccctatcaggctaaggccaacaagcgtaagactgagtacaccaagaacatggacgcctacaacaagaaacaga

SEQ ID NO: 4223 - DNA, 441 bp, Lilium asiatic
caaaggtaaacatccatttggtaataattttgaacgggattcaaacattgttaacaatcgtgtcgacctattcttggtggatcatatcccggaagctctagatcttctttctcagttgttagatgcagatccaaaaaagaggccaactgcattggaagtgttgcatcacccattcttttggagctccgagactcgtctttcttttcttcgagacaccagtgacagaattgaattagaggacagggaaaatcaatctgatctcctgaaagaattggaaagtattgctccagtggcatttggtgggaaatggggtgaaaagttggatgctgcattcgttacagacatgggtcgttatagaaaatatagttacgtctccacacgtgatcttctacgagtcataagaaacaagttaaatcattacagagaactcgcaaaagaact

SEQ ID NO: 4224 - DNA, 381 bp, Lilium asiatic
gcaaaggtggcagtaacagagggtgatgccatggaggagtgaaactgcactctcgttctaaacaagttgatgttactcttcatattccttttggttgtaaggacgacttgacggttattgtgatgacattatctttgttaatcttaaattttagacttcccagcacacttgttatattttcctctgttgactaatgacattatcctcgttaatcttaaaaaaaaaaaaaaaaaaaaaaaaaaaaaaaaaaaaaaataaaaaaaaaaaaaaaatgtggcggttaattataaaaaataaagcttttctgtactcttgtataaaatttcatatttttttttttttaataccttaattctatatttttttttctttttttttttt

SEQ ID NO: 4225 - DNA, 357 bp, Lilium asiatic
cctcaatgtgttgtcttattcccctcttagttgttccttcagaggggaagtctttgatatgaaagctatcgtctctttgatggttgatgttagagccgtaacttgttcttcaagtgactggaaacgtgctgcttttgacatagtgttcttgcttctctttctctgtcttagttctagagatccacgaagttcttattctgtttgtttggtacaattgcgggttgagaacataaaccatagtgcctccgatggagatcataacatagctatgatatcacttaatcctggatcacgcttgaatgattgtatcaaccactcgaatccaaaccactaagagaatcacaataatagagtacc

SEQ ID NO: 4226 - DNA, 365 bp, Lilium asiatic
ctcgatgaacccggccatcgcttttggcccggcattggttagctggagctgggcgaggcagtgggtgtactgggctggtccgctcatcggtggtggccttgctgggatagtctatgaggtcttcttcattgatcatcattcgcatgagccgctcccctccgccgactattgaacgaatcgagatctttgagtttggagtttgaatttcgctatgatctttgttttgttatttgctttgaagttgtttcatcgtcctgcgtttgtttggagaatatgtgagatgagtagatgtgttctctcagtgtataatgttgaacattcactgtggtgaagaagatgatgcagtgatgttgctcttgtttttc

SEQ ID NO: 4227 - DNA, 345 bp, Lilium asiatic
acgctggagacaacttttcaaaaaatgggagcagaccccttcagacccggtggagcgtatggagggtacaaaagagctccttaccagctgagacagtattcggtggcaggttgttgaattggggaaggctatatcggtagctgctagatatccatcttggtatggtctttatgaagccgaaatcgaaaatcgttagagatggactaacagtgctcataatgaggtgggtacctgtagaagaactgttgaagcttgtaaggagaagagcactttaatctattccagttacaatgggaattgtctgtagctgatgaggcttttaaattgatctgctcttttaggctt

SEQ ID NO: 4228 - DNA, 338 bp, Lilium asiatic
cacaatgctacagatcatgaacatggaagctaaaattgaaaaaagtcaaactttttcatacgggggtgctagtcatcctgctaggggaagcttctgttagcatccacgcacattcctacctaaacagagctcattggccataccacatagaaggggtattcctaatgtccagggaactttttttgaaaggtatatataacagacttgatggccaatcagagcgtttcttcaaagataaggataaattattgggaacattagtaaaagaaacatactgactatgagtgtcaaaatcataccctaactaattctttgtatttttataaaatagatatctt

SEQ ID NO: 4229 - DNA, 284 bp, Lilium asiatic
cgacaagtaccatcctggctacttcggcaaggtaggtatgcgctacttccaccgcctccgggcaagttccactgcccgatcgtcaacgtccatcgcctctggagcctcgtccctgaggcggcgaaggagcaagcggcggcggccgggggtggatctgctccggtgattgatgtgagtcagcatgggtacttcaaggtgctggggaaggggatgctgccgctgactcatccggtggttgtcaaggccaagcttgtgtcgaagacggcggagaagaagatcaaagc

SEQ ID NO: 4230 - DNA, 450 bp, Lilium asiatic
caaggttttctcaaactggtcgagctatccgcagctctacatcaaaggggagctgatgggagggtccgatatcgtgttggagatgcagaagagcggggagctgaagagcgttttaaccgagaaagggattgttccgaaggaaaccctcgaggacaagttgaggaaactcatttcctcggaacctgtgatgcttttcatgaagggtataccggatgctcctcgttgtggttttagctcgaaggttgttgacgctctcaggaaggatgggattggctttgggtcttttgatattttgagtgatgaagaaattaggcaggggttgaagactttctcgaactggccgactttttctcaactctactacaaaggcgagctgatcggtggctgcgatatcatcatggaaatgcacaacagcggcgaactcaagtctacactttctgagtaggcagt

SEQ ID NO: 4231 - DNA, 374 bp, Lilium asiatic
ccacgcgtccgaatcccctcaatcatcgtctctcgctctcagcaatggccggacgtggcggggcggtcggctccgcagcggcgaagaaggcgacctcgaggagcagcaaggccggtctccagttcccggtcggccgtatcgcccgcttcctcaaggccggcaagtacgccgagagggtcggcgccggcgctccggtctatctcgccgccgtcctggagtatctcgcagccgaggttttggagttggctgggaatgcggcgagggataacaagaagactaggattgtaccgaggcatattcagcttgctgtgaggaatgatgaggagctttcgaagttgctggggatggtgactattgctaatggtggggtgatg

SEQ ID NO: 4232 - DNA, 451 bp, Lilium asiatic
  modified_base (324)..(324): a, c, g, t, unknown, or other
  modified_base (389)..(389): a, c, g, t, unknown, or other
attctctcacatctctcactaatggcgcccaaggccgagaagaagcccgcggcggagaagaagccttccgtcgaggaggagaagaaggcggttccggcggagaagaagcctgctgagaagaagcccaagggcggaaagaaggtcccggcctcgaaggagggggcctctgacaagaagaagaagaggtcgaagaagtcggtggagacctacaagatctacatcttcaaggtgttgaagcaggtccaccctgacatcgggatctccagcaaggcaatggggatcatgaacagcttcatcaaccatctctttgagaagatggctcangagtccgcccgccttgctcgctacaacaagaagaacaccatcacctctcgggagattcagacttncgtccgcctcgtcctccccggcgagctcgccaagcatgccgtttctgagggcaccaaggcgg

SEQ ID NO: 4233 - DNA, 334 bp, Lilium asiatic
gacttatactatacaaccttacgtccccctacatgctacaacctaactttcccataccggcgactttatacaatttactatccgtcacctaacaacaattcaactgccaaaaccttacaactacccaacttaaaaaactctcaccacacccaacttaatccacttgccgtacatcccaatatgcccacatcgattaatattgaaaacacctgcacagattgaatttccaaacagacgcgcactctaaatgcccaataagacccgccctttagctgctcactcacagcgtcacctgtacactttacacccacctagaccgctacactttccattt

SEQ ID NO: 4234 - DNA, 436 bp, Lilium asiatic
  modified_base (295)..(295): a, c, g, t, unknown, or other
  modified_base (395)..(395): a, c, g, t, unknown, or other
  modified_base (403)..(403): a, c, g, t, unknown, or other
cccacgcgtccgcccacgcgtccgcgctcgcctccttgtcgtcctgatgaaccgaggctgcaggttctcgataaccaactcactcgtgtggcatccactacatcgtccaccaatatgtccgctgcccaatcgccccgttcatccgccccaccactcccataggccgaaatcgccaccatggcctgcgttccagttccatcctctgcgggacccaattgacagggacaggtgccccttctgcttctgtggagtcgaaagcagcaggtgtgttatccgcaaacctggtccgatgcanggcaggtgcttcttcgggtgtgggaactggacagccgcgaggcgtgccaattgtaactactttatgtggtttgtaaagacgagcatctgatgcttggatncgctctgnaggatgagagcttgttgctcatatatgtaatta

SEQ ID NO: 4235 - DNA, 428 bp, Lilium asiatic
cggacgcgtggatccagcagttgctagctgcggagcaagaagctcagcaaatcgtcaatgcggcggggaatgcaaaaactgcgaggctaaagcaggcaaaagaagaggcagaaaaggagatagcagaatatcgtgctaagatggaagctgaatttcagcggaaggttgatgagagcagcggcgactcgggtgctaatgtcaagcgtcttgaacatgaaactgatgcaaagatcgaacacttaaagaccgaggcatcaatcatatctcacgatgttgttcatatgcttttgaagcatgtgaccactgtgaagaattagagcgtcctacatgttgtgaggatgggaattggatcagaaagtctttcgataaaattgtgtgtttcccaagtttttaaaaaatggacaaaactgatctttgttgattctata

SEQ ID NO: 4236 - DNA, 407 bp, Lilium asiatic
accgaggctgtgacagatatgatcagctctcagctgcagcttcaccgttatgctactggtggagaatcaagggttgttactgcccttaaccttctgaagtcacacctcttcagttatcaaggccatgttagtgcggcattggtccttggcggagttgatgtaaccggaccacatttgcacacagtctaccctcatggctcaacagatacccttccatttgctacaatgggatctggctctcttgctgcgatgtccgtgtttgaatcaaaatataaagagggcttgactagagaagaaggaattatgctagtaagtgaggcgatttgcagtggaattttcaatgatctgggcagtggaagcaatgttgatgtgctcgtgataaccaaaggtcacaaggagtacctgag

SEQ ID NO: 4237 - DNA, 331 bp, Lilium asiatic
  modified_base (52)..(52): a, c, g, t, unknown, or other
aacgcggggatccatcattttctaactgttttttaagaacctcaacaaatcntcaatgctcgcccgtttttaaaaactgcgagcctcaaccatgcaaaataagatgcataaaacgagataccataatatcgttctaacatagaatcttaatttcagcttaaggttgatcatatcaatctccactcacgtcctaatgtcaatcgtcttgaacatgaaactgattcaaacatcgaacacttaaataccgacccatcaatcatatataactaactatgtcatatactttcttatcatgttaccactctcaataattagaacgtcctacattttt

SEQ ID NO: 4238 - DNA, 415 bp, Lilium asiatic
cccacgcgtccgcaagaatctgcactaaatgtcggttttgctgccccctaaatgtggggcggaagtcgagcgacctcgacaaaggcctctcggtgtccatgtccccctccgactcgagcgaagaagtcgtgcatctcctcaccgacctcaaaatcgagttcacatctcctccctccgatggtgggtcgccagtatggaagctcgacagctctgagcccaacggccaacgatatgtgacactaaacgggtctccgcataatgaaatcaaccacgataacatgttcaaaattgagaaagcaggtgctttgggctacaaactgctatactgccccagtgtagccggcgtccctgccgatggtccttgcggtagtctgggtatatacttcgaggatgggaacaggtggttggttctgag

SEQ ID NO: 4239 - DNA, 401 bp, Lilium asiatic
agaacttgcaaaaaatctccaaagagattggctaccgtcaaaggagagactggaaaacttggaggaagagcaggggcaaagacaaaaaacatcagaatcctcatccaggaaggaatgcaagcaaaaccagaggcaagatgaggaagaatgaaattgaatgttgatgcagtgcacttataaatagggttgctactttttctgagggcttcaaacttctttagagactacaacctccgacaggacacactcatttcagacgaacgattttcttcaacctgggaattctgatgttaacatcgccttatcagcctcacagcttaatcaggtgagttgcttgctcaagaggcactgaatatacataaaaatctttttggtcactcttatccaggatgttttggttt

SEQ ID NO: 4240 - DNA, 376 bp, Lilium asiatic
gagggatctgagggttcacttcaagaacacacgcgagactgcattcgcaatcaggaacaggcctttggccaaggcgaaacggtatctcgaggatgttattgtgcacaagcaggccattccgttcaggaggtattgtggaggtgttggccgtactggccaagtcaaggcacgccattcaaatgggcaagggcgctggcctatgaaatctgctaaatttattttggatctgctcaagaatgctgagagtaatgcagatgtgaagggcttggatgtcgatgctctttatgtatctcacattcaggttaatcaagctcagaagcagagacgcaaaacataccgtgctcatgggcgtattaatcgttgaaaaccaaattgc

SEQ ID NO: 4241 - DNA, 429 bp, Lilium asiatic
  modified_base (22)..(23): a, c, g, t, unknown, or other
  modified_base (75)..(75): a, c, g, t, unknown, or other
acgcgtccgccgagctgtcctnnagagagactcttgttcgaatcactggtggtatgaacgtcaaagcagacgccngatgattcatccccttatgctgccatacttgcaacgcaagatgtcgcacagagatgcaaggagcttgggattactgctctgcatattaagcttcgggctactggtgggaataagacaaagacccctggtcctggtgctcaatctgccctccgagcgcttgctcggtctggaatgaaaattggccgcattgaggatgtcactccgatcccaactgatagcacccgccgaaagggtgggagaaagggaagaaggctgtaattttcatgacttcctactccttcaaggaaacaagtcttttctaaagattgttgcacggttttatgttttaacctatcattggatttttgagttatt

SEQ ID NO: 4242 - DNA, 377 bp, Lilium asiatic
  modified_base (309)..(309): a, c, g, t, unknown, or other
caaccagcttgctgaggctgatgagtttgaagataagatgaaggagctggagggcatctggggccctatcattgctaagatgtaccagggtggtgctggtccagatatgggtggtatggatgaggatgatgatgttcctactggaggaagcggtgctggtcccaagatcgaggaggttgactaagtttcttttataatgctttttttaggtaactgaaagtatttccttggctatcttgccttgactgcttttgatgatgaacaccttacctgttatgtttaactactttatggctacattagtagtcnttttcgttatctgcatgatgaactagttcgttttaatggattaaaattcgaattctggatttgggttt

SEQ ID NO: 4243 - DNA, 447 bp, Lilium asiatic
  modified_base (383)..(383): a, c, g, t, unknown, or other
  modified_base (437)..(437): a, c, g, t, unknown, or other
tccgcggttgcccatgggtgatcaagggttcattgattttgtgacccatcttctggaagtaaatgcgaagaagcgcccctcagcttctgaagcactgaagcatccatggctgtctttcccatacgaaccaatatcgtcatgagcaatccacaccagagatgcctcgctgggaattattcgtgttcacaacagctagtagacatggaggcatgactgccatgatcgatcgaacaattctggcgcggagtggattgttggtttctgaagcacctcttgggagtagcctcttctgttgcagatctgtgttgtattcttacattttttttcctctcattttgttttgtgagaatggtgtttgcgatgaaatgagtggtgtgctttgngaaaggagtgtctttctactgtatatgatcctgtgattatgttcagcatctatngttagtacct

SEQ ID NO: 4244 - DNA, 351 bp, Lilium asiatic
gcaccctgtacgggatttggcgtaggagggtttgttgacggtgctcatttttggtgggggaggtgagggggttgagagtgttgatagatgggggagttgtgtgtttaaagaggagtgaagggcaggatactctcaacttagtattcaaattcgctctcaactcataacagtgccaactcttaacagtgccaaattttcacaaacctttcaaacaatatcgctctcacattgaccgaataactctcaacttagtatactgatcattctcctaataattaagtgttaagaataaaaagcatagctttgttagactttaattaagttaaaataaaaatctaaataattaacttt

SEQ ID NO: 4245 - DNA, 324 bp, Lilium asiatic
  modified_base (8)..(8): a, c, g, t, unknown, or other
gccacccnttcgtacaactactcccacattaaaactacggtttatagtccgcaactccctgtcctttcctatgagaaaccctaacagctactaagatcgacaagatgcacgacatgatccatgacatggacaatctctcggaagcggacaacgcaatgatcgcctacatcatcaatcaactccacatccgaaacagttttagaatgtataatacactcttgaacagatgcttcaccgattgcctggagtcgatccttcataagacccttgacactcatgaacagacttgtgttcacaagtgttctaagaactttctgaagcact

SEQ ID NO: 4246 - DNA, 232 bp, Lilium asiatic
  modified_base (157)..(157): a, c, g, t, unknown, or other
ggaaaacccgggcgacgacgcgtccggtgctttcataattttgcagttaacttgtttagaggatagatagatatttgaaaagacccgcttgattacgtattgcaatgttttgtctaattactgttctggcttgttcggtatgagtttcttagtttgngcaaaaaaaaaaattgtcttatcaattttatttttcaattttaatttcattttttttcttttttttaattttatt

SEQ ID NO: 4247 - DNA, 445 bp, Lilium asiatic
ggggaggaggttccttctctgctggaggtcctgggaaagggatgtattctcgcttatatgtgggagtcttgaacgagtttcagcagatacagtctttctctgctttcaacagtatctacaacaacactggcctttttggaatttatgcaaccactggttcagattttgttggcgaagctgttaatttggcagtaagagaactacattcaattgctgaccctggacaagttcaccaaaaacaactagatcgtgctaaagcgacttccaagtcggctattcttatgaacctggaatcgagaatggtagcatctgaggatattggacggcagattttgacatatggagagaggaaacctgttgaacacttcctgaaaataattgatgaaatctcactggaagatattgccaccatctccgaaaagatcatttcttcaccccttacaat

SEQ ID NO: 4248 - DNA, 371 bp, Lilium asiatic
gcgagggcgtggaggatctgcggggaacatgttccgtatgtcgctaggtctgccggtgggggcgactgtgaactgcgccgacaacaccggggcgaagaacctgtacatcatctcggtgaaggggatcaagggccggctcaatcgcctcccttcggcttgcgttggggacatggtgatggcgactgtgaagaagggaaagccggatctgcgtaagaaggttatgccggctgtcatcgtgaggcagcgcaagccgtggcgccgaaaggacggggtctacatgtactttgaagataatgctggagtgattgtgaatccaaagggtgaaatgaaaagttctgccatcactggggcccattggaaaaagaatgtgc

SEQ ID NO: 4249 - DNA, 439 bp, Lilium asiatic
  modified_base (405)..(405): a, c, g, t, unknown, or other
caaaccctcgccgccgatctctgatctccgatggcccgtaccaagcaaaccgctcgcaagtccaccgttggcaaggcccctcgcaagcagctcgccacaaaggctgcgaggaagtcggcgccaaccactggcggcgtgaagaagccgcaccgctaccgtcccggcaccgtcgccctccgtgagatccgtaagtaccagaagagtacggagctgctgatccgaaagctgccgttccagcgtctggtgagggagatcgcgcaggacttcaagacggatctccgtttccagagccatgccgtgctggcgctgcaagaggcggcggatgcgtaccttgtggggctgttcgaagacaccaatctctgcgcaatccatgccaagcgcgtcaccatcatgcctaaggacatncagcttgcgcgtaggatccgtggggagcgcgctt

SEQ ID NO: 4250 - DNA, 224 bp, Lilium asiatic
aaaacccccgcgacccacacattcgcagattttttttcttatttattattaaatttataaccaacttccaatcattaacccccgcctaattttataaacatatacccccctaacattcttatatataatccccctaccaaaattctttataccacataaattacactaatcatcatctacttccatcaacctattatatatcaactcttctaaacctcctaaaa

SEQ ID NO: 4251 - DNA, 294 bp, Lilium asiatic
  modified_base (5)..(5): a, c, g, t, unknown, or other
aaaanccccgcgacccacgcgtcctcgcattctcttcaatttcatatcggatttattttggtgatgttttatcactcatctccgcaatttttcttaaggcttagaggcaattcttcttttgagtgacataataaatattggggtcaaaacataccctcaatgaactcccataccagaatatgttttcccagcatactctttttttataagatgacttgttactcgttgtgaatttatattataagagacaataacatacacaatgatttgacatgtagacctttttaataaatt

SEQ ID NO: 4252 - DNA, 430 bp, Lilium asiatic
  modified_base (52)..(52): a, c, g, t, unknown, or other
gcgccacgcgtcggtggtagtttgacgtatggaacttgaggacacttaagtntataactcgtggggataccttaccttgccccgtcctttggcggcactgagagcattgtggaccaccctgccattatgtcttactgggatctccctgcatcagagagggccaagtatgggatcatggacaaccctgtgaggttcaactgtggtgtggaagccttcgatgatttaaaggctgatattgttcacgctcttgaaaagatctgactcatgtagtttagtcatagaatcgtgagcttctaatatcggttgcaattcgttttatgttactgaaaaccataaatgatgtgattgatgcttattcatgtcttatagctagatctggatgttgttagacctgattataacattatggttgagttcttgtgttggaagc

SEQ ID NO: 4253 - DNA, 386 bp, Lilium asiatic
gtggacgtgactctgcaagatggcaggcagtttgagggtactgtggtgaatgccgacttgcgattctgatattgctgttgtgaagattgaatctaagactcctttgccgtcggctaagctcggggcgtcgggcaagattcgaccaggggattgggtgcttgctttgggctgtccgctttcgctgcagaatactgtaacgtctgggattgtgagctgtgtggatcggaaaagcagtgatctaggtcttgggggaatgcggagggagtacttgcaaactgattgtgccattaatcagggaaactctggcggacccctggttaaccttgatggtgaggttgtgggagttaatatcttgaaagttgcgggtgctgatggtttgagctttg

SEQ ID NO: 4254 - DNA, 404 bp, Lilium asiatic
tccagataggcctgtagatttggttgttccgttccagaattctgtcaaacaaattattccgcagacaactgttgtaacaactagaagggtgctggaaagactcgctgcttattactgctcacaaagaatggtttggaagcttcttaaagatgtttctaaatcttctaggcgaaaggctgggaggcatatgccagcgacgatattttgtttcagtgttgctagaacaactttcagagggcatttattaggggtaacggcttcgtggattatccaagttggaattgaggcttacagatgcttttttcgcaagtcgagcaacaatgttattgaggttgaaatatcaaaaaagttcaagatttttaaaaaaaaagtttattcaacaacttgtaaatgcagtgcatcat

SEQ ID NO: 4255 - DNA, 172 bp, Lilium asiatic
gacccacgcgtccgttgactctttttcatattttcctacttatcttctataccctcttcactacacatacgccgcattttatattgcaaacccccgcgcttgataataaatcatctttccctttgtcacatcttgtagcctaagattatcaaacatcactatcctgcatttc

SEQ ID NO: 4256 - DNA, 206 bp, Lilium asiatic
  modified_base (98)..(98): a, c, g, t, unknown, or other
gggaaaaaaaaaaaaaaatatacaaacattttttaaaaaaaaactgtcctccattctcccgccttttttaaaacaaacccctccctccaacaaaatanttcttttatatactcacctaaatttaattaactaaccttcatctttcaacttttttactcccaaaacccttaaataacccaactaaatcctctttcattacattccta

SEQ ID NO: 4257 - DNA, 342 bp, Lilium asiatic
  modified_base (12)..(12): a, c, g, t, unknown, or other
ggcaaattgaantcttttctcccccctccatccaatcgaagatgagctccaccgcgaccgccactatctcaccaagggcggccggggaaagggcatgggcaagggcactaaatcggtgtcccgttcaacgaaagctggtcttcatttccccgtgggccgcatcggccgctacctcaggaagggccgctatgctcagcgtgtcggctctggcgcccctgtctaccttgccttcgttcttgagtaccttgctgctgagctgctgtaacttgctggaaattcggcaaaggataacaagaagaacaggatcataccgcggcatattcaattggccgtgaggaatga

SEQ ID NO: 4258 - DNA, 430 bp, Lilium asiatic
ccaagtcacttttcctcaatttgatagctttcgagcaatgtcatattgactgtgggaacgggagcacgtcatatgtgatattcatggacaacttgattaactcggaggaggacgtgagcttcctacactaccgtgggataattgagcactggctcggaaacgacgatgaggtcgccgatcttttcaaccggctgtgccaggaggttgtgtttgacattaacgatagctatctatccgggttgtcggaacaggtgaacatgtattacaaccatcggtggaacgcttggagggcaatgctcaagcacaagtacttcaacagtccttgggctatcgtctccttagtcgctgctgttttcttgctgctgctaacgcttgctcagaccttttatagcgtgtatggttattattggcccagttcatgaattcagct

SEQ ID NO: 4259 - DNA, 228 bp, Lilium asiatic
ggaaaaaaacggcgacccacgcgttctggcttatatactatctattctcaaagttttataaccatcttttctgattaatatccccgcttgtttatatcccaaggatcactcactcccatctataccatcctctttatttattgttcttaccttacatctacaacataactttacaccatgaaaggtcatcttttatacttttataacttttcacaaatctttctaaaa

SEQ ID NO: 4260 - DNA, 409 bp, Lilium asiatic
ctccaccaccacctccgccgcgccggcgaagctgaccccgaagaagatcaacctcctcgagtcccacgccatcaagaactccctcgacgaagccgtcaaagagatcgtcaccggcaaggggtacgccgaggacgtgcgactgagcaacatgcggctgttgatcgggaccctgatcatcgctgtcgcgcttgtcgctcagttctatccgaagaagtttccggagaatcgcgatttcctcatcgtctgcatcggattgtatgtggtgttgaacggggtgttgcaattctttagctatacgaaggagaagagcgctatcctgtttacttatgcacccgctggatctttcaacagtactgggttgatcgtgtcatctaagctgccgagattctctgacacctacactcttact

SEQ ID NO: 4261 - DNA, 305 bp, Lilium asiatic
  modified_base (4)..(4): a, c, g, t, unknown, or other
  modified_base (59)..(59): a, c, g, t, unknown, or other
aaanggaaaaacaagaccgacggacgcgttctataaggtttcatactcttcccttttgncattttaaggcactactccaatataaacaaaccgcgtgttttaatcaagaacgtacgtgcaactatcttatgtggtattgtaccccccaagcatttagagaagggattctttattgaaccaacacttattacgaacgttaccaccttcatccaaatcttgatggacgatgatttttatcctattatctatttcaataacatttgcttcagaagattaatctattgaacttgcaaatgatattcatt

SEQ ID NO: 4262 - DNA, 414 bp, Lilium asiatic
cttgaaatctgtgtattctgctattcatcaagctggtgatcaaggactgagcatggaagggattcttggagtcatggacttacgaggaatgaataacgctaatatagtggtggacacactagaagcatttcagttagccattaaggttaactcatacgactctatcagaatagttgattcttcatacagggcaaaatattttataagcacagatgcagaacatagtcgggatcatgaattggctacttacttgaagtccagagttacaagttatttatcctttcagcatctgcctctagaaaaaactcggcatctgcttctagacaagactgataatatcctaagttctaagaatgttgctagtgtgaccctttttgatgggcataaagtaactattcttcactttgcccaaag

SEQ ID NO: 4263 - DNA, 68 bp, Lilium asiatic
agacaattgtgttgaaccatatttgatctcttttgagatgtttaatgttgaagggccccgccttctat

SEQ ID NO: 4264 - DNA, 373 bp, Lilium asiatic
gcgagagatcttagtctccgctcgcctattaaacaatcaatcaaatctcctcatccgccgcctccatatctctttctgcttggcgcggcacttcaatggccggccgctacgacagcaaccccttcgaggaggatgacgtcaaccccttcccgggacgtggaaaaggagctggacaatcgaattatggtggacgttcattctacacaactcacccaagcactgttccttctgctttcaattctaggctctcaccactgactcctgaaccacctgatttctacaacaaccgcaatgcaacaattgatatttctttggataattcgaaggatataaagaagacggagaaagaactccaagccaaagaagcataatt

SEQ ID NO: 4265 - DNA, 437 bp, Lilium asiatic
tcggtatttccccaaatttcagcttgaatccgcaaaatctagagaaattgtgtagacttgggagccgtcgagatgtcggggatcgacatcggcctcctcttcgagaagtcgaaggagttggaccagctccggaaggaacaggaggatgtctttcaagaaattaacaagttccacaagaagctccaagccgctccagaaatgtttgataccatcttaagtaggcttcgtcctttatatgctcatgccaaagagctctctgaaaatgaagtaagtgcttcgacgacattaatggggcagttggatgctttgctacaatctggacattcagctcctcagcggaaaaagatagatgagcagaaaaagaagcggatgaagcctgatgcagacttaattaggtttcctcctactgcatctgtgagaagccaattaaagcatgc

SEQ ID NO: 4266 - DNA, 417 bp, Lilium asiatic
gacccacgcgtacgcaatgtaatttttgaagccaactgatggatatttttacttttgtagtctttgccttttccgccgtttttttaattttcggtgtttaatttttttaatttttttattttatttttttttttctaatttttatttattattttattattttatttttttttttttttattttaatttttatttttttttatttttttttttttattactttttattttatttttatatttattttttttttttttttttcttttttttttttttacttttttttttttattatttttattttattttttttttttttatttttatttattttatattatttatatatttttataatttatttattttattaattatttctattttattttttatattttaattttttattttttt

SEQ ID NO: 4267 - DNA, 433 bp, Lilium asiatic
gagaagggaaaaagataaaggagggactttttatatattcctaatttggaggggagaaacgagacctaaaaatggggaaatgttgcttagactcaacgtcttcgtcttgcactgccactattttagtagctccttgggaaagctcgtcggttcttgttggagttctccgtaacttgtcggagctcaccccagaaaatgaccgatctatccgttgcttaacaaatcctgaccgatctcctcctaatcagccataatttgccaaaaagtagctgaaaaataccaaatccgatctgattttgtcggaaatcacaactcacgaccaaaacgaaatttctcaagccctcaaacatttagatctcatcaaattcatggagaaatatgatggaaaaaggaagagagtttgcccgaaagcttcaagggagatgatcagaga

SEQ ID NO: 4268 - DNA, 207 bp, Lilium asiatic
  modified_base (17)..(17): a, c, g, t, unknown, or other
cgcttgtggcacacagngatggtgggctcgggacgcatgcgctgattttggctgtggagaggctgaataatacttgcttgaagggcggagcggcatctgagtgaggtacatctgtttttctaagtatgttttcatagattgtggtttgctgattggaatgtgtacaataatgtactctttgctgtccgtgcgaatttcttgtttgat

SEQ ID NO: 4269 - DNA, 381 bp, Lilium asiatic
gggttttgccgccgtcgccgttgctgccaccggagctcgttgcagcctaaggacgaattggagctaattgacacttgagaaaatggcccctcccgcgaaagttgccaagaagcctgatggtaaagcacaagcattgaaagttgccaaggctgtgaaatctggtgcttcaaccctgcaaaagaaggccaagaagatccgcacatcggtgacctttcatcgtcccaagaccctgaagaaggatagaaaccccaagtaccccagaatcagtgcccctccaaggaacaagctagatcactaccagatcctcaagtattcactgaccactgagtctgccatgaaaaagattgaagacaacaacactctttgtttcattgttgacat

SEQ ID NO: 4270 - DNA, 303 bp, Lilium asiatic
cgctcgaagaaaacaggaagctagaaaggctttcggcgaaaccctaatatgagggcgaacgggaagaagaagcggatgaggaggctgaagaggaagcgccgaaagatgaggcagagatccaagtagatgccgctgcaggactgtaatgcatgcatcgtggcttactgttggattaagttggctcttttattgttaagtttggtgttttaggggactgactatctggttcttttttgcttaaattatgaagtttttaattctcagttaatctaaatcttggcactttttacatgttttgggtag

SEQ ID NO: 4271 - DNA, 442 bp, Lilium asiatic
gagatgactgctcgcaataaggagatgacctctaaacgtagagtgaatgctggtctccgccgcgattatgctgatgatgtaaatgtcaatgacaatgctcttgagaatgtggggcaatatactgatcaagggaaagggaaaaagggtccttcctactctggtgggttagttttggaacctaaaaagggcctatatgacaagtatatattactcttggatttcaatagtctttatccttccattatccaggaatacaatatatgcttcactacaattgaacggtctcctgatggtctggttcctaacctacctttttccaaaactactggaattttaccagagctgttgagaaatttgattgaaaggaggcgattggtgaagcaatggcttaagaatgccaaacgtcttccaattcagcagtttgatatttaacaacaagcat

SEQ ID NO: 4272 - DNA, 352 bp, Lilium asiatic
  modified_base (7)..(7): a, c, g, t, unknown, or other
ccactcntccacagacacttgggcggacttttttggtcacaacatacgaaggacaacacgcgcactttaatccattatgaccacgcttaggcggccacccaccgccgtcattttctgtttcttcggcaacattcacagctcaaccatcgatgaatcatgcctcaccatatgtgagctcgctcttcccgcagcagattaacttctattcgtctaacactctatatgtttccactgttgataaaagattttgccatgaaggggcgagtaatgtgatttcacgtcaaaattccatcatctataatggactgttgcatgattttatttggcccatctctaacaaggattaatgatg

SEQ ID NO: 4273 - DNA, 319 bp, Lilium asiatic
  modified_base (52)..(52): a, c, g, t, unknown, or other
aaaaccccggccgacccacacatacggagatctatccttttttctacctcanatcatcatcagcagcaattgctctctttttccgcccttttaatactacttataacatcaacaacaatctttctctttttattaatatctccaacttcactctctcctacaataccctcctcaaatccctcaatatctccatatgtaatatcttaattattgccaacaatctcccaccttttttcataaaatagatctaatactattctattctttctaaaattttatttcaccattttaatgctaataatctttatctctcaacttc

SEQ ID NO: 4274 - DNA, 303 bp, Lilium asiatic
gttcaaagtcaggtggtgggcctcgtgctaggcgttgagttctcgtgtttctgtcatcagcggcggtcgatgcgcgaggtgcgtgcgttggacatctagtaatgtagttgtttagcagtggcgttactttggtttgttatggtactattatcgtagatgagatgagtgtatgaaactttagtatcgtaccctgtgcgtggtctatccttataacgctcggtttattttctgtaatggttggtcaactgatggaactatccagcttctgttgttaattttcttaatggtacctgcttgcttttt

SEQ ID NO: 4275 - DNA, 337 bp, Lilium asiatic
cggacgcgtggggcagaccctcttccggtggaagaacaggtagttactatttataccggagggaatggctatcttgatccgttagaagtcggacaggtaaaaaaatttctcgttcaattacgtacctacttaaaaaagaataaacctcaattccaagaaattatatcttctaccaaaacactcaccgagcaagcggaagctcttttgaaggaagttattccggaacagatcgaacagtttctactccaggaacaaacataaattcatcactcttaattcttaaagaataataattgagaaatagttctgatttgaatcattaattcttggtatagcg

SEQ ID NO: 4276 - DNA, 344 bp, Lilium asiatic
gaaagactggaacccgtctcttggattgcggcatgttttgattgtggttcgatgcctacggagggagccatttcccgaatccgcactgaatgagcaggctggcaagatgctactggaggactacgaggaatatgcaaggctcgctaggttgtacactggaatacatgcactcaagcccaagccgaagactggagcgatatccgagtctacgactgcactcaatgtggaccagaagaacactgcttgcagcgccaaggctcagcctaccagtcaaaccccgctggctacccaggatcagaatgcagttgtcattccgatgacaagtgcggttggagcatcgactg

SEQ ID NO: 4277 - DNA, 349 bp, Lilium asiatic
ggtcctctcaccactgagcaccgccattcttccgtcggagaacctatctatcacgtatcgaatggattgttgaaaagagatgagggggggggggagggggccctttgtgcccacagtggaaacttagcggcagtaagctcttgtaagagggatcaatcttggcggtttccattgtgagacattgtcgagagattattgagagattgtccagtgattgagagtttgttttcgctgttgcttgtgggagaatttggtgaccacctgcccgaggttgaaatatttaagttgtaatatctctttaacattgctatgtacaatgactaatgaatgaatgcctctatttttatct

SEQ ID NO: 4278 - DNA, 405 bp, Lilium asiatic
acgcactctacaccgcacgcatctggactcttcccctctccaccgaaaccctaaccccagctgctttctatgaagggagtcaagccgaggaatcgcaccgtcaagcctgatgacaagctgggggctaagcggaagggcgccgacaaggtgagcaggcaggtgaagcgtgccaaggctggcaaggaccccaacgcgccgaagcgtcctccgaccgcgttcttcatcttcatggatgatttccgcaaggagttcaaggagaagaacccgaacaacaaatctgtggccactgtgagcaaagctgggggtgacaagtggaaatcgatgtctgatgctgagaaggcaccctaccaggccaaatctgagaagcggaagactgagtacaacctgaagatggatgcttacaac

SEQ ID NO: 4279 - DNA, 430 bp, Lilium asiatic
  modified_base (374)..(374): a, c, g, t, unknown, or other
ccacgcgtccgtcagcgccagcttgcctgttaacgagtgcagatacgcgatctacgacttggacggcgtcacagctgagaactgccagaagagcaggatcttcttcatcgcgtggactcctgatgtgtcgagggtgaggagtaagatgctgtatgcgagctcgaaggagaggttcaagagggagctggagtcctcgtagctctgcgtcggatcgccgcacttctcgacgacgacttgcttcagcttctcgtcgatcttgaagatgatggagcggtgagtccgcttcgccttgagctcgaggaagcgcagcttgcactcgtcgttcaccgccatccccgacgccgcgttggccatttccggacgcgtggggccgncgcagccaccaccgtcagttcttcgcgatggtgcacgtcgtcttctatcgtaacta

SEQ ID NO: 4280 - DNA, 396 bp, Lilium asiatic
  modified_base (62)..(62): a, c, g, t, unknown, or other
  modified_base (86)..(86): a, c, g, t, unknown, or other
agaggctcgccctgcaaaggccgccaagacctccgccaaggacgctcccgcaaagaaccgtnctgctccggctaagaaggcattanccccaccaccggctaagaaagcattagccccaccaccggctaagaaggctgtgcccgtgaagaaagctgctcctgcagcgaaaaagaaggcggcgactccagcgaaagggaagtccccggcgagaaaggcgcctgcaaggaaagcggccaaaaagtaggcttttgattcgtgattccgatggcagctggctgtaaattggctgaatgttgagggggcatgtgcgtcgttggcatgcgaaataaggttttctgttggctttttaaggtaatttggggaactttcttcccccacctaaactcctttcttttt

SEQ ID NO: 4281 - DNA, 177 bp, Lilium asiatic
cgaaccacgcacaacccgcactcatacatcctttccaccttccttcttctccacaaccacctttacccttcaacggcggctttatcttcatcaacggacatctatctactatcttgtcccctttatttcttatcttcattctttatcttaacatcttttaaaatcttccatcttctt

SEQ ID NO: 4282 - DNA, 346 bp, Lilium asiatic
  modified_base (11)..(12): a, c, g, t, unknown, or other
  modified_base (37)..(37): a, c, g, t, unknown, or other
  modified_base (64)..(64): a, c, g, t, unknown, or other
cgaggcgctgnngatgtctgatctgcctggtgtgcanaggcaggttgaagcgccggcgcacgcngcgtatgctggacgcggtggcggtgggtttggtggaagtggctttggcggtcgcggtggcggagccaggaactgaaggcgtagcttcgaactctctgggtttaggtgaaatggttaccatgttgctttactttgtgttgtcttgatctccatctgaacttggtattggagtttttgagtattttgtttgaaatgtctagacttgattaatttcttgtctcgtgttttttagattgatgttactttggaatttcaattgttaattacgtatattctcgtgggt

SEQ ID NO: 4283 - DNA, 352 bp, Lilium asiatic
gggaattatagacaagaaagggaggaaccgaaagacgatcgtgccggtgcaccaagtctcgggaggggttcttcattaaactatccattgtctaatcatcctgtgctccatcctttttctgataatcagagactgaacaatggactttataataagcatatggatacgagtatgatggcccaaacgagtttcggtactcccttgctcgcgcaaaattgcttgcttgataaatcagcttctgatggccagcagatgtacaaggatgaatacaattttgagactccgaacttgacgggtgggttgaattctaacggatgcaattttgatgatcttatgaatgctatgatcaaaa

SEQ ID NO: 4284 - DNA, 309 bp, Lilium asiatic
gaccgtgtggttgattctccttgctgtttggtcacgggtgagtatggatggacggccaacgtggagaggattatgaaggcccaagcgctgagggactccagcatggctggttacatgtcaagcaagaagaccatggaaatcaacccggagaactccatcatggaagagctgaggaagcgggctgatgctgacaagaacgacaagtcagtcaaggaccttgtgttgctgctgtttgagactgcactgctcacctctggtttcagccttgatgagcccaacaccttcggcaacaagattcaccgcatgttg

SEQ ID NO: 4285 - DNA, 284 bp, Lilium asiatic
tgtaggtgacctcgtgtgtttgagactttctccttaagcgtatttatatcctataggcctgatatatttaagaaataagagtgttgacacggaaataagagtatgatctattgaattttgtttgtcaaaaaaaaaaaaaaaaaaaaaaaaaaaaaaaaaaaaaaaagacaaccgatataaaagatccaaaaattaaatacacattcatgcgacctaataactcttcgtttgccaaacctaaaatcaatacagtgcccccctttttacaacaaattaactgggaa

SEQ ID NO: 4286 - DNA, 401 bp, Lilium asiatic
gtaaacggccgtgtttccaactcccaaggccttgcaatgctagctactggaaatccgcaaggcatgatcactctgtttccaatttccaaacatgccttagaaggaacttctggaacggattttggtttcattcccaccaattccctcttgaatctccactctgagaaaagtagctttcgccatttcatcgatgactggccaaaagatcactctgaccgctcaaccgtcgcctggccagaagatacactatgtgacaggactcagctctctatttccatccccctgacttctgatttctcgtcctcctcatcctctcctaaccaaggtaaactctccctttcaccactgagaatgtcgaaggagatggatccaattcatatggggctaggagttggaggtgt

SEQ ID NO: 4287 - DNA, 293 bp, Lilium asiatic
cgcgtccgcggacgcttcctgcatctttcactactctatttccaaagggaacgcatctgttcctcccgccgtttttactaaacatttctgtcacaagacttggtcaatgaatcatgcgacatctatcatgacaaatggtacggctggtgctgctctaccaaaccctcaaggatcttttatgtatcgttctatcaatgtgacccaagtatacctattgaagaatgatcctcctgttgtcatcaaaggaaaacgcctaacaacacttaatggaatctcttatacacctccacata

SEQ ID NO: 4288 - DNA, 387 bp, Lilium asiatic
  modified_base (60)..(60): a, c, g, t, unknown, or other
gcgagatgaatctctgtatgtcgtgaacatttagaactgttagtgcatatgtcggagatnggacgttactgggctgccatgcaggcatcctcttgctgcttttgagcagacacatggttgtattttttactattgttcgaagtattttagaactgattgctaccgcttgacatattccttgtttatcaattctatactctatagtacttatttatgctttcttttcctttcttttctttccttacctatttttttttttttcttatccttatactaattttttctatatatatgttttttttcttttctattgcttttttctttattttttttttatttttaccttctttttatcttacattctattttttactttttatttttctt

SEQ ID NO: 4289 - DNA, 104 bp, Lilium asiatic
  modified_base (36)..(36): a, c, g, t, unknown, or other
tgatcgggcttactgaatgaaaaggtaaggtgccanaaggccaaattcattaactttaaggatttttacattaattcttttaattaatccattaattaatacat

SEQ ID NO: 4290 - DNA, 217 bp, Lilium asiatic
caaaaaaaacaaacatacaaaaaaaacaaaaaaaattattttaaaaaaaaaaaacaatcaaaatataagagcatttcttaataccaatataaccctccctcataataaaatttcccaaattataacctattcttattcacttttaacttttaacaattcatatcctattctaaactattttacttctttaacctttaattataccttaccccatttc

SEQ ID NO: 4291 - DNA, 239 bp, Lilium asiatic
cgtgcagaaaattttaacttgtacttgactttcatatctattccttatttataatttccaacagtcgcgttcatgtttgaacttatagacatcctctcccttcaattattaaaaaaaaaaaaaaaaaactttttatttttttttttaacataatactattcctcttaaaaatctctattataaaatattaatatataaaaatatttgttgttctttttaaattattcatttttacttat

SEQ ID NO: 4292 - DNA, 448 bp, Lilium asiatic
gatgatgaaggggttgatgaccaggccgtaaaggtggttgatattgttgacaccttccggggtcaggagcggcctgctttcgacaagaagcagcttatggcatacatgaagcggtatgtcaagcagttgacgcctaaacttgatgccgagcagcaggtgctatttaagaagcacattgagggggccattaagtttctgcttccgaagctcagtgatctgcacttttttgtgggtgagagcatgcaggatgacagtagccttgtgtttgcttattacaaggaaggtgctactgatccaacctttttgtacttcgcgtacggattgaaggagatcaagtgctagacttgaaaaatggcagcatatgggaaaaatagtttacgttactagtttgcttgttggctttatggatgttgagatatattgcttgtttttatccttactgtgtact

SEQ ID NO: 4293 - DNA, 417 bp, Lilium asiatic
tcagatctgagtcgtcaccgcagcaggagagagatgaggcttttccatccatggcccgtgttgcttaggagggagtggaaccgcaactgtcccttcctcaccgtctttgcgatcaccggcgccctcatcaccaagttcaccgtcggccttactgaggaagacgcgaagaacttgtgcttcgtgcaggagcacaagaggtaaatttccatgcttgatcccgcacctggtctgcttatgagttagctgcttgcttaaatttcccgtttttctgtcttgtaaaaatattatgtccaattgttttgctttttgaccatttttctgattagctttctgttttaatttaatttcatctttgtacattgtccattttctctttcattgtctatatttcttttattttcctttttcttttaattt

SEQ ID NO: 4294 - DNA, 384 bp, Lilium asiatic
acgcggacgcgtgggcggacgcgttgtcaagcgtcggccaagggtttcttcagctgtcttcttggcatcgcccgccaagatgcagaatgaaaaggggcacatgatggatttgtacattccgaggaaatgctcggcgacaaataggctgataaccgccaaggatcatgcggcggtccagatcaacatcgggcatctggatgagagcggcgtgtataccgggcagttcactacgttcgcgctctgcggattcattcgtgctcagggtgatgccgacggtgctctggacaggctgtggcagaagaagaaagttgaagccaaacaataggagacatgcattgtcttaatgtttaagagtttaaacttttgaggttgtttaatatggat

SEQ ID NO: 4295 - DNA, 181 bp, Lilium asiatic
  modified_base (10)..(10): a, c, g, t, unknown, or other
ggctatcgcntatttaagatctaaattttgattttcacttatagtcaactcagggtgcatagttagttgttactttctgagaaaccatatttatataccgaatagcgaattgtagtatgaagaagtttctccggtggattatatgtacatttgaaatttccggcagatttgtatttttttc

SEQ ID NO: 4296 - DNA, 326 bp, Lilium asiatic
  modified_base (60)..(60): a, c, g, t, unknown, or other
  modified_base (94)..(94): a, c, g, t, unknown, or other
  modified_base (257)..(257): a, c, g, t, unknown, or other
cccacgcgtccgaaagaatctggtgagcttcactttctgcaaggatgaggctactttganggcagcagctgagaggatgaaagtgaacctcgcnaaaaggtcgtgcttattgcttctgtaacttacgtgccttaaatatataacttagagaataactactcgccattctagcttcttcgtggcgagacgtctgcatgaatctgtagtaataggcatcactcgtattgaatactatgggcgaactgctactccttcgntactttattctctcttattcacagcatattgggctactctcccgacattgtagattctcattattaaat

SEQ ID NO: 4297 - DNA, 190 bp, Lilium asiatic
  modified_base (120)..(120): a, c, g, t, unknown, or other
gatttaccgagctccctaagattactgttgaggttggaggtgaaagcatgcttgacatgcgtaaggacgtttatttatggaggtggtggcacccccatgcctgttttctttagtcgcggngctcgtgccctttatagtttctaatgttttattcattccttttttccatcaactatcttcctctttttta

SEQ ID NO: 4298 - DNA, 319 bp, Lilium asiatic
catcaagggccatcgcgctttttaggcatagttctgcgtcgctgctgccacacctcgtcaaaagactccttctagaatcgccgaagccctccaatcaatcgctcccttctctcaggcgcaccttctccctctacgaccagattaatctcatctacaccatccccgaccatcaattgcgcttccaaggctattctgacacatgatttacagttaatggcgtgaagcacgatttgtgcttacttgttatagaaaacatgctgatgtcgtgggctcccaaaagactttctgagaatacagctgacagtttatctgtattcaa

SEQ ID NO: 4299 - DNA, 428 bp, Lilium asiatic
gtcttctgaaatgcattctccccataaaggtaccttgctacctcgaagcatacacatcaatgaatgaagcgtgttagtaacatcaaacaattatgtttaaagatactataatcaatttgaggaatatgtgatctatatcgagagaagttaagctagaattccggaacaaatttgtatacttgagcaaacagatttttcttcacatattttgaagtaaatatgctaacttttctcattcaaaaaccttatcatattaactagctttgtgctcatgttaaccgcttatcacatgcaatgatgcctaagttctttctttaatttgtagtggcttatagcatttatttctacgaagatgaagagggggcaaggatatgccatcgagcattcggagccctttttgcatttttgtccttcgttcagggagctat

SEQ ID NO: 4300 - DNA, 380 bp, Lilium asiatic
aaaaaaaaaaaaccaaaaaaatttccaaacttctctaaaaacaaccccatcaataggaagaatcggcgaaactaacaaaaaacacccacctttaaacatactataaatcacttttaacaaaaattctatctatatcccgacaccataaactagacaccctaaaccaacccgtatactaaaaaaaacacctttttttccacacacctaaatacaaaaaccctccccccttttaaacaaaaaccataatataataaccaccttctcccacacttaaaccccttattacatccccctcttcccaaattcattctctaattataaaggccctatacccttccctttcacaaaatataaaaaacttaaaatataaatccctctac

SEQ ID NO: 4301 - DNA, 439 bp, Lilium asiatic
cctcgctggcaggcatctgactgactccctcatgaaaatcctgactgagaggggctacatcgtcacaactacagctgaacgggaaattgtccgtgacatcaaggagaagcttgcatatgtggctctagactatgagcaggagctagaaacagcaaagagcagctcatcagttgagaagaattacgagctgcctgatggccaggtcatcaccattggagctgagcgcttcagatgccctgaggtcctgttccagccctcactcattggaatggaagctgctggcattcacgagaccacttataattcaatcatgaagtgtgatgttgatatcaggaaggatttgtatgggaacatcgtgcttagtggtggatcgacgatgttcccgggcattgctgaccgtatgagcaaggagatcactgcactggcttctagcagcatg

SEQ ID NO: 4302 - DNA, 431 bp, Lilium asiatic
  modified_base (10)..(10): a, c, g, t, unknown, or other
cggctggaanacccggccgacccacgcgtccgcggacgcgtgggctcagaaccctactttgttttcaaaacagctgacatgggggccgcatccgaggccaagaagggcgccggcggacgcaagggcggtccaaaggctaaatcggtgagtcgttctgtaaaggccggacttcagtttcctgttggcaggattgggcggtacctcaagaagggtcgatatgctcagcgtgttgcttcaggagctcctgtctaccttgctgtcgtccttgagtatcttgctgctgaggtaattgcttactaaatctctgccggatttggggtttacttgtgatagttcttatttgaattttggaatttaggttcttgaattggcgggcaatgcggccagggacaatatgaaaaatcgacatgtgccttgacatgtgtgtttgg

SEQ ID NO: 4303 - DNA, 261 bp, Lilium asiatic
agttcctctcatatttgggaatacatctgtgtcaggcagcatggctgcaggggggaatgtggttcaagagatgatggacgtgtgtggaaagtataacatcacctgcgacatcgagttggtgaagccagactacatcaacgtggcattggacagcatcgcggaaaatgatgtgcgctaccgccttgtcattgatattgcaggggagtctaatctctagttagcttgtgctgtagcttgaatttcatgtcgcattaacatgca

SEQ ID NO: 4304 - DNA, 57 bp, Lilium asiatic
gacccacgcgtgcgccacgcgttcgttaaaataataaaatccaattcaactactttt

SEQ ID NO: 4305 - DNA, 169 bp, Lilium asiatic
cgtacgcgttcttaggcttttagcagtcgtcgtttccaaagagcgattccagatctgccttccgtcgtgctctaacttctttttggtgatccacaaagtaagatgatgccaaccatggaaagaatgatgaggaggagttacccaaggaaccccttttcgttatgatgct

SEQ ID NO: 4306 - DNA, 142 bp, Lilium asiatic
  modified_base (13)..(13): a, c, g, t, unknown, or other
acggccgcggtgntttttaccacccctttgatcccttttctcgcatctaggaccggcaacttgaaggtctgtttctataaaagcgcgcaatcgcaatctagaatgcatcctcattatacaaacaggatgtggccttcatata

SEQ ID NO: 4307 - DNA, 317 bp, Lilium asiatic
gtcaccgtcgttggctttcgtgagggcaacatcgtcacccaggtcaagactgaggcgacttgcggctactgcgccgtccaggtcgggtaccgccgcgtccgcgaccggaagctgactaagcccgagctggggcacctggccaaggccggggctatacctatgcggcatttgcaggagtttcggctgcagtcggtggaggggtttgagccggggcagaggctggcgattgacgagctttttaaagagggtgatttggtggatgtgtccgggaactctattggcaaggggtttcaaggtgggatcaagagacacaattt

SEQ ID NO: 4308 - DNA, 435 bp, Lilium asiatic
cggacgcgtgggggcccccaccaaggcggcgcgcaagacggccccagcaaccgggggcggggagaagccgcaccgcttccgccctggtacggtggctctccgcgagatccggaagtatcagaagagcacggagctcctcatccgcaagctccccttccagcgtctcgtccgcgagattgctcaggacttcaagactgacctccgcttccagagctctgctgtggctgcgctgcaagaggcggccgaggcgtacctggtggggctgttcgaggacaccaacctctgcgccatccacgccaagcgagtcactatcatgccgaaggacattcagctggctcgccgcattcgcggtgagagggcctgatgatcttctgccgtctgattctgcgtctgttcttttgtccgataagccaattacttttgaaaatgggatgt

SEQ ID NO: 4309 - DNA, 237 bp, Lilium asiatic
gtctcaatgacatttgcttcgtctttagatatccagtgaaaaaaaaaaaaaggaaaaaaaagagaaaattgaaaaaaaaaaaaaaaaaaaaaaaaaaaaaaaaaaaaaataaaagcgcgctaaatgtaaataaacaaaaacatacgctctacctaaagcgacaataaaagtaattttatatgaaacctaaaaaaaagttaaagaccgtacaaaaacaaagataatgaaaaggaaaac

SEQ ID NO: 4310 - DNA, 371 bp, Lilium asiatic
  modified_base (121)..(121): a, c, g, t, unknown, or other
gaacggaaaatcaatgatgacttacaggatgctcgaaaagaattgattacggccctggaagatgacttaacccgcgtgtcatcgattgctataaaaagaatgggagaactagacgataagncattccttaaggtctgtggggaaagattctcaaaggatgctggtatgaaagcttctacttattgttctcactggcaggaagagcttaggaacccagattggcatccttttaaagttattatggttgatggaaaagagaaggaagctttgctagaggatgataagaagctacaatctctcaagaatgagctgggtgatggggtgttcaaaactgtaaccacggccttactagagattaatgtatataaccc

SEQ ID NO: 4311 - DNA, 414 bp, Lilium asiatic
gcgcccacgcgtccgttagtgagaatactgattttcgtcagtttaccaaatatattgacaactcgttgtattagcaaagtataaaaagaaatataaaaaacatcatgttacattgatctaaaagttcattatagtaatcatgaatatattgaggttgatacatgtcttcattattgaattgtaaattattgactaacaattttctaacgaatacctatcgaaataaattatctaaaaaaaaaaaaaaaaaattttaataatataaattaaatattaatttataaaatattaatataattaaatttttattacttttatttatattttgtttatatttaatttcttttttcttattataaaatttcatttcttttaaattttaattagacttaaatttggtttccttttttaata

SEQ ID NO: 4312 - DNA, 324 bp, Lilium asiatic
gcgggcagtcaggtctgcagccgtcctactccctcgctgcgccccatcggcggccatcatggaagcctctgctggccggagctcccgctacttcagcaacgacggccgcatcctcagtgaggaggagagggccgccgagaacgcttacattcagaagatggagaaggagaggttggcgaagctgaaggcgaacttggagaaggagaaggcggcgtccgagaaggccaaggcagaggggaaggaatcagtgaatcctaccaaaggctgagcttgtaaatataggttgacgatgacgaggaaaatggatctcagctttgatggagg

SEQ ID NO: 4313 - DNA, 346 bp, Lilium asiatic
cggacgcgtgaaccaattctattgagcccatcccgagatctcatctcccttcgttgactgggatcattgtagcttaatcaatcatacctttcactgtttcattatccttcgattctcctcattcttattattcagatattattagaggctttctaatgatttctcatttattattttagattggatgttgatcaacagcaagagtgatgcttctgcgttttgtgcatcattgagaggattcagaagatcattttgataaagccttattgccgtagctttaccattatcatcaagtaagttacctttagaatcatatattcaatattactccttctttattctttat

SEQ ID NO: 4314 - DNA, 318 bp, Lilium asiatic
  modified_base (250)..(250): a, c, g, t, unknown, or other
gtatttggcttaccaacatttctcaagggcaggaagtttgcggagggctttggatcaaggagccattttagcgacattagctatcatctgtcttactgttgttcccatcttgttttttatttgatgttatcataaagatgcctacatttactgatcctcttgcagttctcttgtataatacatcttaagttgtaacgcctcttgcagttctcttgtataatacatcttaagttgtaactcctcttgcagntctcttgtataatacatcttaagttgtaacttctcaggtttgtagtaacatgatatggatatgcctcc

SEQ ID NO: 4315 - DNA, 344 bp, Lilium asiatic
cggacgcgttaatttggactctgctttttttcacgactgccagtggcatctggttgttgtcgcttctttaaaacttatcccttcccttcattcggtgccggcttacacctcatccgacattcttaatgctgacttctccacatcatggctccatctccatgtaataatcctccctacttgctaccattccattcaaacatcatgtgatccggaaactacctttagaacctcatgtcatctcctcttgatggacagtgcttgcacgttgctgactgccacccattcagatcgataacctgggaagccataccgtggaatagtgacctacgaagtgtatctcacca

SEQ ID NO: 4316 - DNA, 439 bp, Lilium asiatic
atcgtattcgaggaggaggagcgatgtcggctggaggggaggaggacaggaggccgtcgggcgccgctgatgcggggaatcatatcaatctcaaggtcaagggacaggatggcaacgaggtgttcttcaggattaagcgccagacgcaactgaagaagcttatgaatgcctactgtgaccggcagtcagtggacttcaattctattgcatttctttttgatggtcgcaggctgcgagctgagcagaccccggatgaacttgagatggaggatggagatgaaattgatgccatgctgcatcaaactggtggaggtaatggtccgtgacgtctgtagttttatttttgctgaagactctgtaaagtctttaaatatcttggtatgttggggatgaacctgctgtctgaatcaatgttgaatgtgtgatgggatgtgctctt

SEQ ID NO: 4317 - DNA, 439 bp, Lilium asiatic
gcggtttcgccaacatcgtctgcaagaaggccgatgttgacatgacgaagagggctggtgacatgtcagctgcggagctggaaaatctgatgaccattgtggcgaatccgcggcagtttaacatcccagactgctttttgaataggaagaaggattataaggacgggaggtactctcaagtggtgtcgaatgcgctggacatgaagctgagggatgatctggagcgcttgaagaagattaggaaccaccgtggtctgcgtcactactggggtctccgtgttcgcggacagcacaccaagacgactggcaggcggggtaagactgttggtgtctcaaagaagcgatgagctctgttgtttttcatggctctggttttggttccaaatattcaaggtctgttgacatcatgctttcttagtctaaggagtgttttttaagc

SEQ ID NO: 4318 - DNA, 189 bp, Lilium asiatic
gccagtgcacattttactaaaagactctaaattaatcgtgaaaactctttgagaacttggcaagaatgttatgtataattcatctgtcaggcatagaaaaagcagttgctataacttccatgattcatgttaagaaaaccaaatgtatgcacctaattcttttataaaagttgatatcaatcttcttgt

SEQ ID NO: 4319 - DNA, 348 bp, Lilium asiatic
  modified_base (125)..(127): a, c, g, t, unknown, or other
  modified_base (176)..(176): a, c, g, t, unknown, or other
acgaaagtgaactgtttggtcttgaccttattaaaatcttcatatgtcgagttgcagtaaaatggcgtggatcttgtattgaggcatgtcaggactttctttcctttagacgctatcgcatgaannnagaatgaacaacttatatcgcatgcctacctactttacctatatggtgntggagtaaaataaacttcagttgccacttaacttgaatgacatccaaactcctgagcaagctcttgtaggaatttatggtgtactcaaatcaaaaaaggagtcattgtagtataatgagatacggggcccccgttctaaaggtccacaacttccttgcccttccttctgacg

SEQ ID NO: 4320 - DNA, 293 bp, Lilium asiatic
  modified_base (260)..(260): a, c, g, t, unknown, or other
gagacatggccttttctcctttcatgcggtgtttcatctaggaagtctgatgatgggtttgaagccgttccaaaaatcaggggctggtctatgtcggtggtactgcgtggtgggttatattgcttcttactctctgcattggttctgatgctgtgctttaaggtgggaattcgcatctgtagcaggtaaggtaatttaatctgtattggggaaagttgtaccctcttagacttataagacttaccttttgtacctgtgtngtatacttaattatggtttagctgttttcttta

SEQ ID NO: 4321 - DNA, 312 bp, Lilium asiatic
gcgggatgccaggcagaagacgagatctataaagtcctaaggactagcgatgaagttccccaacgctcagactggaaagttcaccatttctctgagcctccttcatccaggaactctgcttagtgacagagtcgagttcggggaagaaggagtaggtagtagtcgtattctgttagatgatatgtatttttttttatctgcttgagttgtagtaagttagcatatcattctcttccgtgtataaactttttatttttgtctgtaataattcattttctctttacttcattctgtactcaaactcttactttc

SEQ ID NO: 4322 - DNA, 426 bp, Lilium asiatic
  modified_base (13)..(14): a, c, g, t, unknown, or other
  modified_base (20)..(21): a, c, g, t, unknown, or other
  modified_base (28)..(28): a, c, g, t, unknown, or other
  modified_base (33)..(33): a, c, g, t, unknown, or other
  modified_base (43)..(43): a, c, g, t, unknown, or other
  modified_base (69)..(69): a, c, g, t, unknown, or other
  modified_base (72)..(72): a, c, g, t, unknown, or other
  modified_base (74)..(74): a, c, g, t, unknown, or other
  modified_base (76)..(76): a, c, g, t, unknown, or other
  modified_base (81)..(81): a, c, g, t, unknown, or other
  modified_base (83)..(83): a, c, g, t, unknown, or other
  modified_base (86)..(87): a, c, g, t, unknown, or other
  modified_base (100)..(101): a, c, g, t, unknown, or other
  modified_base (105)..(105): a, c, g, t, unknown, or other
  modified_base (107)..(107): a, c, g, t, unknown, or other
  modified_base (130)..(130): a, c, g, t, unknown, or other
  modified_base (180)..(180): a, c, g, t, unknown, or other
  modified_base (194)..(194): a, c, g, t, unknown, or other
  modified_base (221)..(221): a, c, g, t, unknown, or other
  modified_base (232)..(232): a, c, g, t, unknown, or other
  modified_base (235)..(235): a, c, g, t, unknown, or other
  modified_base (251)..(251): a, c, g, t, unknown, or other
  modified_base (263)..(264): a, c, g, t, unknown, or other
  modified_base (269)..(269): a, c, g, t, unknown, or other
  modified_base (279)..(279): a, c, g, t, unknown, or other
  modified_base (283)..(283): a, c, g, t, unknown, or other
  modified_base (296)..(296): a, c, g, t, unknown, or other
  modified_base (317)..(317): a, c, g, t, unknown, or other
  modified_base (321)..(321): a, c, g, t, unknown, or other
  modified_base (326)..(326): a, c, g, t, unknown, or other
  modified_base (328)..(329): a, c, g, t, unknown, or other
  modified_base (347)..(347): a, c, g, t, unknown, or other
  modified_base (355)..(356): a, c, g, t, unknown, or other
  modified_base (362)..(362): a, c, g, t, unknown, or other
  modified_base (372)..(372): a, c, g, t, unknown, or other
  modified_base (416)..(417): a, c, g, t, unknown, or other
  modified_base (419)..(419): a, c, g, t, unknown, or other
  modified_base (422)..(422): a, c, g, t, unknown, or other
aaaaaaggatacnnaaaacnnactaagnattgngaaacgagancaagaaaaaggcggacaggaaacccnggnancnagggnancgnnggcccccaaaaanncaancncaagccaaagggaaccccaaaancaaacaaaggggaacaaaagaagaaaaaagaaaaggaaagcacccacacnaaaacagaaaggangcccacgaaagaacaaccaaaggaaanaaaggggcacnagnaagaacaacaaaacanccaacacggcannaaaanagaaaaaaancaanacaaaacaacacncggaaaaaccacacaagccangaanggagnannaaaaagccaaaccaacanaccaaagnnccacanaaaaaaacanaaagaccaaaagaaaaaaccacaagccggaaacccaacagggcnncnaanaggc

SEQ ID NO: 4323 - DNA, 443 bp, Lilium asiatic
ggctggtggtatggtagcggttccgcccaaaggtggattcagcttccatcgcggctgtcgcgaggatatgctcatgaagagagggctccagcttccccctgttctcaagaccggaaccacaatcgttggcctaatttttcaggatggtgttgttcttggagctgacacaagagccactgaagggccgatagttgctgataagaactgcgaaaagatacattacatcgcaccaaatattttttgttgtggcgctggaactgcggctgataccgaggctgtgacagatatgatcagctctcagctgcagcttcaccgttatgctactggtagagaatcaagggttgttactgcccttaaccttttgaagtcacacctcttcagttatcaaggccatgttagtgcggcattggtcctttgcggggttgatgtaaccggaccacatt

SEQ ID NO: 4324 - DNA, 428 bp, Lilium asiatic
cccacgcgtccgggaaaatggaaggcatttttggaaaagcagctgtagctcggttgataacgggactcaaagagacactgctactgatcttcttaatggtttcagagaaaactttgagggtgactttcaaccctcaactgaagctaaagagggctttgtaaataacaatgtgtacaatccaaatagaaaaactgagctcgagcttgtgaataatacagagagcctgaagaaggaggcccggctcgagcatgtaaataataaagaggccctaaagatggagaaccattttggagggttacgatagtgaagactaattaaggtcggagttgaagagcactggagtttttgtttcaagtctagctcacaacttgaaaaattctttcgtttttcgcgaagcttggtaacatgtctttaaaatggtaatgaca

SEQ ID NO: 4325 - DNA, 378 bp, Lilium asiatic
  modified_base (377)..(377): a, c, g, t, unknown, or other
gcccgaagtcctcgtcggcagcgacaagaccatcgccgattattacttcgattcctactctgagtggggcattcatgaaggaagtatatcaactagtctcacccttgtggcatctcctactggggaatcattttgaaactcattagtattcagtgcaatcgcaaatgcgcaagttatgccatccatactgatttagcaacttaacttggcttctttatgataacttgattggcccttattttattttcacacttgcaacttatcatgctttcacaattttgttatataatgccaggcttcgaacatacccatggacgcatttatagctaaatgcccttgggagacccatacacatattttgcttgctttctgcattnt

SEQ ID NO: 4326 - DNA, 326 bp, Lilium asiatic
  modified_base (121)..(121): a, c, g, t, unknown, or other
gaaggatcgggagaacaggaagctcatcttcattcgttgccagcagtacgccaaggagtatgcgagtcatgagaaggagctgattgagctgaagcgagaggcgaggctgaaaggggctttntatgttagcccggaggccaagcttcttttcatcattcgcatccgcggtattaatgccatgcacccaaagacacgcaaaatccttcagcttcttcgtttgcgccacatctttaatgtgagttttctcaaggtcaacaaggccactgtgaacatgttgcaccgagttgaaccctacgtcacttttgggtattccaacttgaagagtg

SEQ ID NO: 4327 - DNA, 266 bp, Lilium asiatic
cacgcgtgcgcagtagtggtccatcttggtagcggtgtcaatcacgggctctatgtcacccttatcaaaaggcatgaccagtggttgttcttcgatgatgacaaccttcagatcatcgacgagtccatggtgcagacgttctttgtgtccacgcaggagtactttagcaacactgaccatggctacatcttgttctacgagagcattgttgccacgtgattagatagtcctttcagagctgaaaaaatgtgtaatttaacattttt

SEQ ID NO: 4328 - DNA, 380 bp, Lilium asiatic
accacgcgtgcggaaagaaaatcatttcaaagaaacaaaacataaacaccaacacattgatgaagaattccaggctttcaagggcaatgtcagtgccacctgggtccggtggaggacagaaatggacaaccctggagcacagtggtgtgattttcccacctccatacaagcctcatggagttaaaatgctgtacaacggacaaccagttgatcttactagtgagcaagaagaggttgcaacaatgcttgcagtgatgaaggaaacagattatgcttcaaaaccaaaatttatagaaaacttcatgaacgactggagtaaagtacttgtgaagaaccatgtcattaagaaatttgagctctgtgacttcactcccatctat

SEQ ID NO: 4329 - DNA, 316 bp, Lilium asiatic
  modified_base (9)..(9): a, c, g, t, unknown, or other
  modified_base (13)..(13): a, c, g, t, unknown, or other
  modified_base (27)..(28): a, c, g, t, unknown, or other
  modified_base (33)..(33): a, c, g, t, unknown, or other
  modified_base (39)..(40): a, c, g, t, unknown, or other
  modified_base (46)..(46): a, c, g, t, unknown, or other
  modified_base (88)..(90): a, c, g, t, unknown, or other
  modified_base (94)..(94): a, c, g, t, unknown, or other
  modified_base (98)..(98): a, c, g, t, unknown, or other
  modified_base (100)..(100): a, c, g, t, unknown, or other
  modified_base (103)..(103): a, c, g, t, unknown, or other
  modified_base (107)..(107): a, c, g, t, unknown, or other
  modified_base (147)..(147): a, c, g, t, unknown, or other
  modified_base (149)..(149): a, c, g, t, unknown, or other
  modified_base (155)..(156): a, c, g, t, unknown, or other
  modified_base (168)..(168): a, c, g, t, unknown, or other
  modified_base (180)..(180): a, c, g, t, unknown, or other
  modified_base (190)..(190): a, c, g, t, unknown, or other
  modified_base (195)..(195): a, c, g, t, unknown, or other
  modified_base (207)..(207): a, c, g, t, unknown, or other
  modified_base (209)..(209): a, c, g, t, unknown, or other
  modified_base (211)..(211): a, c, g, t, unknown, or other
  modified_base (218)..(218): a, c, g, t, unknown, or other
  modified_base (223)..(223): a, c, g, t, unknown, or other
  modified_base (225)..(225): a, c, g, t, unknown, or other
  modified_base (227)..(227): a, c, g, t, unknown, or other
  modified_base (229)..(229): a, c, g, t, unknown, or other
  modified_base (236)..(236): a, c, g, t, unknown, or other
  modified_base (238)..(238): a, c, g, t, unknown, or other
  modified_base (240)..(240): a, c, g, t, unknown, or other
  modified_base (243)..(243): a, c, g, t, unknown, or other
  modified_base (247)..(247): a, c, g, t, unknown, or other
  modified_base (255)..(255): a, c, g, t, unknown, or other
  modified_base (259)..(259): a, c, g, t, unknown, or other
  modified_base (263)..(264): a, c, g, t, unknown, or other
  modified_base (274)..(274): a, c, g, t, unknown, or other
  modified_base (280)..(280): a, c, g, t, unknown, or other
  modified_base (282)..(282): a, c, g, t, unknown, or other
  modified_base (301)..(301): a, c, g, t, unknown, or other
  modified_base (303)..(303): a, c, g, t, unknown, or other
cccacgcgnccgngaagcccgggctgnnagaanggcacnnacccgngccaaaggcagaagcgaggctccaaacccagaagaaggcccnnnccanccgncngcngacnaaacggaagcccgccgagcccaaaacgaaccgcaacacgnanccaagnncaaagagaaagngcaacaagacanagaagggaanggcgngaaggaacaacncnanaaacccngcaanananangcacccncncnganccanaagcaacncggngacnnccccgccacngggcgnancacaccaaaacaagcagcncnagcaaacgagcag

SEQ ID NO: 4330 - DNA, 447 bp, Lilium asiatic
  modified_base (9)..(9): a, c, g, t, unknown, or other
ccacgcgtncgctccttcgccgtcaacagtgggtaccagtcgtggggccctgggttcggggagctctttttcgccatttgggtgatcgtccatctctatccgttcctcaagggtcttttgggcagaactaaccgaacgcccactatcgttattgtatggtccattctccttgcttccatcttctcgttgctgtgggtgcgtatcgatccctttacttctccgagccagaaggcagctgtggctggtcagtgtggtataaactgctgagagtttgcttggaaatggttttcgcgcatgtctgatgtgaatgaaagaacatcaagggcttgttttcgatcagatgaaaggagttcatcaatgcagttggcattgttgtgttagactcgtatgtctcttggtgtaagatagtggatatcagcagcttacagacactattgggtgtttctt

SEQ ID NO: 4331 - DNA, 301 bp, Lilium asiatic
  modified_base (170)..(170): a, c, g, t, unknown, or other
  modified_base (273)..(273): a, c, g, t, unknown, or other
cccaaggtcaagcacatcacaccgtcggtgctgtctgagaggctgaggatcaatggttctcttggagggaaggcaatcaaggacttgatggcccgtggtgccatccgtgtggttactgcacactccagtcagcaaatctacacccgggctaccaatacctagaagtcctntgcttgttatgtcatcgtccagtcgtctttaggagccttcttcagttaaccagttttactggtgcttttgttatcaactatttgtgttattgaacttgctgtnttttctgagctggtgaaagtagattgat

SEQ ID NO: 4332 - DNA, 337 bp, Lilium asiatic
  modified_base (95)..(95): a, c, g, t, unknown, or other
gcgctcgaatctctcatcaatcatgtcaggccgtggcaagggagggaaggggctcggcaaggccgcggccaagggccatcgcaaggtgctgcggnacaacatccagggcatcaccaagccggccatccgccgcctggctcgccggggcggagtgaagaggatcagcggcctcatctacgaggagacccgaggcgtgctcaagatatttctggagaacgtcatccgggatgccgtgacctacactgagcacgcgcgccgcaagacggtgacggcgatggatgtggtgtatgctctcaagcgccagggccgtaccctctatggctttgggggttgatct

SEQ ID NO: 4333 - DNA, 391 bp, Lilium asiatic
gcgcggacgcgtggcctttgatctataaaaggcctgcaagatcgtcttgtaaagaacaagatgaggcacattcgttgcccctgaggggaaggcaaaaactatggcggacaccatgggttaaggcagatgccccatggagagttcaattgttcaccagctgtggatgttccacccagcactactgagagcgagcccaatgacaatggagtttcaaagccgctttccagtggtttacttgcaaagctttgagggatatcaaatgatgtaacaaatatgagcaggcacttaaaattgattccaagttaaaagactctttcttgtgggttggatggtaaagtaatctggactgtgctggaaatgactctaataagatgctcatatgatgaccctt

SEQ ID NO: 4334 - DNA, 413 bp, Lilium asiatic
  modified_base (20)..(20): a, c, g, t, unknown, or other
  modified_base (32)..(32): a, c, g, t, unknown, or other
  modified_base (56)..(56): a, c, g, t, unknown, or other
  modified_base (68)..(68): a, c, g, t, unknown, or other
  modified_base (293)..(293): a, c, g, t, unknown, or other
aacgcgcgcgggcacgcgtncgcccacgcgtncgcccacgcttccgcccattcgtncgcccacgcgtncgcggacgctttcgtccactcttacgcccacgcgttctaaaaaaaaaaaaaaaaaaaagaaaaaaataaaaaaaaaaaaaaaaaaaaaaaaaaaaaaaaaaaaaaaaaataaataaaaaaaaaaaaaaataaaaaaaaaataaaaaaaaataaaattaaaaaataaaaataaaaaataataataaaaatatataaaaaataatataaaaaaaaaaaaaaaaaaanttttttctcttttttaatataactaaatattttttttttttaatatatgggtagaataaaattttttaaatatatttaaaataaatataaattttttattgacttttaattttaaatttt

SEQ ID NO: 4335 - DNA, 396 bp, Lilium asiatic
  modified_base (1)..(2): a, c, g, t, unknown, or other
  modified_base (24)..(24): a, c, g, t, unknown, or other
nnatgacaggctttacaacgcttngccagaatttagcttcccactaggaaaccgttgatatgagtgtgaaggtaataactctttacttgaaacttgaattatattttatgttgtggaactaacttaatgtatacatctttgtaggctacttttggagggatcattgagtcaattatctgacacttcaccaagttttacccgtatctcttcattgatctgattttgatgatcagggacacgagtaaaattgaaaagtacctttgatgatcagggatacgagtaaaattggaaagtacctgcttgttggcgtgagaccgcgtaccctattgaagtggatctgcgaaactcattgagaaggtcatacaacccaagagtttgaaggagatcatgaggaca

SEQ ID NO: 4336 - DNA, 412 bp, Lilium asiatic
  modified_base (26)..(26): a, c, g, t, unknown, or other
  modified_base (39)..(39): a, c, g, t, unknown, or other
cccacgcgtccgaatagagctcatgncaccagcagaccntgcctcaaaaggcgttttcttcgcaaggccctctctcatgcattacaactcaactagagatgagctgctagaatctgctggtgaagtctttgcaaatatcgcatccggtatactgcgggtacgggtgaaccatatatattctctctccgaagctgcacgcgttcatgctcatctcgaggcgaggaaaacgactgcatcggtggtgttgatccccgatagctaaaatagatttctgtggcaaggcctcggagaaataattgatgaatgtctggcttgttttcggggtaaaataagggagtacacatgtttgtactgtttaaactaagtgtgaaatgcctgctgtaatagtacaccagtgcatgcatctgatagt

SEQ ID NO: 4337 - DNA, 127 bp, Lilium asiatic
  modified_base (124)..(124): a, c, g, t, unknown, or other
atggtagttcaagggtacgaagagagcttcacttattattgtacaaattctcattgaaaaatgcgcatttatcttggctcaatgatagcaaaaggtacctgaaaaagttgtgttcgacattttntat

SEQ ID NO: 4338 - DNA, 242 bp, Lilium asiatic
ggacgcgttgcttctccctcagaaccctagttttcgaaacagctgagatggagaccgcatccgatgctctttaatggcgccggcggactcaagggcgttccaaaggctaaatcggtgagtcgttctgtaaaggccggacttcagtttcctgttggcaggatttgtcggtacctcaagatgggtcgctatgctcagcgtgttggtttatgagcttccttctaacttgcttgcgttcttgagta

SEQ ID NO: 4339 - DNA, 339 bp, Lilium asiatic
  modified_base (158)..(158): a, c, g, t, unknown, or other
  modified_base (160)..(161): a, c, g, t, unknown, or other
  modified_base (168)..(170): a, c, g, t, unknown, or other
tagggatctcataggtccggtgcaaacacctcctgtactcaaagttctggaacgccaaccccaagaagaagggcaaggagatgatgctctccactaaggtcggaatgtttgccctttacttccccgctttcgtcgctgccgcggcctcattcttcgtncnnggtgtcnnnctaggcgagcggtccgggctgctcaacgccgtcctggccattcatttcttcaagagggtagttgaggtcttattcattcaccaatacagcgggaagatgatcctggacttctgcatcttaatatcccttaactatttcattagcaccgtaaccattatctacacacaat

SEQ ID NO: 4340 - DNA, 361 bp, Lilium asiatic
caaggcgatctgttctgacagaactgcagaggttgatcctaaaagcggagtctgcattacgacagagggaagaggagaatgaaatactccaacagaaactccagcagtatgagacccgttggtcagagtacgaactcaagatgcgaaccatggaagaggtctggcagaagcagatgcgatcattacagtccagtctctcgattgcaaagcgaaccctatccgccgatgaacctgagcgcaagtctgatgcatctgtcgaacaaagctgggacaacactagcgtgaaccacaacgggacagcacccgatgaaaccccgtcacgccccccatcacgttttggagagcgagacatgaatgcggg

SEQ ID NO: 4341 - DNA, 179 bp, Lilium asiatic
  modified_base (5)..(5): a, c, g, t, unknown, or other
  modified_base (56)..(56): a, c, g, t, unknown, or other
  modified_base (121)..(121): a, c, g, t, unknown, or other
  modified_base (123)..(124): a, c, g, t, unknown, or other
tcganccacgcctgcgcgcagtcttgtttatcactatataccacaaatttcgaagnctagtcgctcccattgatggaccggacaagtggagagagcttgatagcttttcattcactatctncnntactgtaaattctcatgcaccactggagcttcgtgatgccctttggagtgtttac

SEQ ID NO: 4342 - DNA, 334 bp, Lilium asiatic
  modified_base (5)..(5): a, c, g, t, unknown, or other
  modified_base (82)..(82): a, c, g, t, unknown, or other
  modified_base (104)..(105): a, c, g, t, unknown, or other
cgcgngcggaaagatctcgatgagattccaccagaaggcatcaaagttgtcttaaatgatgataacttcggcactatatgtnctgatatcgacggtcctcctcnnactccatatgaaaatggtatattccgcatgaagctattattatctcgtgacttccctcagtcacctccaaaaggatacttcataacaaaaatcttccatcctaatatatctgcaaatggcgagatatgtgtcaacacattgaagaaagattggaatccaagccttgcgtacgacatgtcttgcttgttgtcagatgtttgctgatcgaaccattccctgaatccgcatt

SEQ ID NO: 4343 - DNA, 341 bp, Lilium asiatic
cggacgcgtgggcggacgcgtggcttccagctgtgcgcccaccagatctccaccatcgactggcagctctccggccccgccggcggcatgatcgtctttgtctctggctccctccaactcgccggcgaacagcacactctcaagttcagtcagatgttccatctgatgccgacgccccagggaagcttctatgtacagaatgacatattccgcttgaactatgcatgaggtgagttataaacagcaggaatgtactagccagctaggacctgaaactgcagaattttattggacaaagattcatcttttattgcgttgctttatggttgttcgaaggatgt

SEQ ID NO: 4344 - DNA, 297 bp, Lilium asiatic
tgcacgcgtccggagatccggaagaaatggggaggtggcgtcatggcatcaaagtctcagaccaatacaaaggccaaagaaaggctccttcagaaggaaattgcccagaggatgacctaggcttattcacttttgtgttttggtagtggatgggctaggctaggctaggcggcttcttttccctttagttttaccttacccccgtgcattgtgctgagagtagtgaactaaatacttttaatctgtgaaatgaatgcttgatgatttaagctatgttatggtctccttcagactatt

SEQ ID NO: 4345 - DNA, 138 bp, Lilium asiatic
  modified_base (127)..(127): a, c, g, t, unknown, or other
gtagtgagttcgatcggccgaggaggccttacgagcagaacagcggtactgacaggccgtcgaggtggccttatgagcggcacagcgttactgatcgtgcttacgggatgaagcgggagggtgcggngagggggaatt

SEQ ID NO: 4346 - DNA, 216 bp, Lilium asiatic
  modified_base (66)..(66): a, c, g, t, unknown, or other
tcgagcaattccctcattttaactcatagagtatctttatagatgcagtctgtaaagatagccganggctctttcatccgcatggtcgtctcaaggaagaagttctttccaaaattcatcaatgctgtccttcagtttcccgtagtccgcatctgccgctttctcaagaaggtcccctatgcaaattctttattcacctgagctcctctttacctt

SEQ ID NO: 4347 - DNA, 198 bp, Lilium asiatic
attcttggttatgttgatgaggatttggctttcactgactttgtgggtgacagcaggtcaaggatttttgatgctaaggctgggattgctttgaatgataactttgtgaagctggtggcatggtatgacaatgaatggtgctacagcacccgcgtggttgattttttccgccacatggatgcgaccaagtaggacgtg

SEQ ID NO: 4348 - DNA, 421 bp, Lilium asiatic
  modified_base (315)..(315): a, c, g, t, unknown, or other
atggatgctcgcaatgaatgtcagtcatgaggataatcgtgcactttgtgagcctgactgtacaccatcatcaattgctgcttgggatattccgaagtgctcagggctgtgtaatccagaaaagaaaatgttgacactacacaaaacagaaatttgttcgagcagtccgaccacaactacaactgccgatgaatagcaagtcagtgttcacttctccctaccccagggccattattgagttggatatacagcttacgctggtggctctatagcatgcattgctaactatagcatggctttttacttaatattctntattcttctgtagattgtcatagggggtatatgtagtcattcattgggaatgaattgaacaactggaatcacgccccatcattatttatatgtactatcagggttc

SEQ ID NO: 4349 - DNA, 376 bp, Lilium asiatic
  modified_base (1)..(1): a, c, g, t, unknown, or other
nttcgcggacgcagtggagctgaaaatccgttggaaagaactattcatgcaagtgtgaagaaagcaaagggttagcgagaatttacattttggcactttgagtatttaatttaattttttttaaaatatcattaattaatattcattataattataaaatatattatatttaaaaatataatttatattttttcttaatttaaaaatatatttatttgtataaaatatattatatatttataataatataatatatttattataaatattatatatattataatatattttataatatttactatatttttaaatttattttataaaatattctaattattttacaaaaattttatttataattattattattata

SEQ ID NO: 4350 - DNA, 226 bp, Lilium asiatic
gatttaccgagctccctaagattactcgttgagggtggaggtgaaagcatgtttgacatgggtggaggcggcagttatggaggtggtggaggccgcatgggtggtggctttagtcgcggcggaggtggttttggaggtggcggaggtggttttgcaggttgtcaacttgtctttttatagtatgtctcatcgtttaccttttttcctctccccactgggccttttt

SEQ ID NO: 4351 - DNA, 318 bp, Lilium asiatic
cgttgagccaatctgctacttttgctgcttaaaaatattgttcggaataatgcagactttgtttctgtacaaggtcgtaccagtgttcattgagggtgtgatgtcgttgctgcttttctatatttttatgttgctttttcagcccatattttactgctatgtaacattgtggtgtcgtaccattgcctatgaagtatgagttgctggttaccataagtcaaagctctctttgttatgcatgttcagtttatgaggattatcaattagaattggtctttacggccatcaataaaaaaaaaaaaaaaggttgttcgtttt

SEQ ID NO: 4352 - DNA, 305 bp, Lilium asiatic
cgtttctaatgaaacttccaaatccaggcagtcttgcaaggttctgtccttcaatatttttctcttgcgtgtaatagttcatctgatagagttgaattatgaggcttctgcttctctgctctttatatttgactctttttttttgtggacatgctgcttcgatttcatacactttcttatgaagcttatatgtgttggccgcgtgctgcctcgatattaatgtctcaattagaattattatatgttgttgccttaaaaaaaaaaaaaaataaactattattctttcttataaactttattcctta

SEQ ID NO: 4353 - DNA, 271 bp, Lilium asiatic
ctaattctttacttgcttcgattgtaggttcaatggatctaaaggatgatttgaagaagatgaagcagagagccacttgagtctgagatcgatggagctgaaggccggtccaaggaagaagaagaggatcaaagatttataatagaagataccttggctactaaagcgggtatgtgatggagtggcttatgatagtgacaatggcggggaaaccaaggatcgtggatttcaagcatggtcgcatagagttgaagcagtctttactataaag

SEQ ID NO: 4354 - DNA, 324 bp, Lilium asiatic
  modified_base (285)..(285): a, c, g, t, unknown, or other
tcgaggacgctttgtcgccacccctctcccttcctagatcgtgtagcgcaacccatccaccagataagattcataacgaggagggacagatcatacatctctacatcccgaggaagtgttccgcgacgaacaggctcatcaccgcgaaagatcatgcggcggtccacatcaacatcgggcatttggatgagagcgcgctttacaccgtccagttcactaccttcgccctttgcggcttcattcgtgctcagagtgatgctgatggtgctctggaccgactttggnagaaaaagaaagtagaagctctccagcagtaaaaagtat

SEQ ID NO: 4355 - DNA, 362 bp, Lilium asiatic
aaacggtgtcgtcccatcctgttccagtctgacggtccaaatgctgtgcatcaggaaccgttttcccatgttaaccaacatgcgttccattccagtacgatcgaggactgctaccaccgaagagtcacataatggaaaccccttaacctcggcaatcggcgaagaggctttcaatgcaacaggctcatcctgcctttctaccaaggagttcatgtgacccaaaccattttcgcatgcttctaacttaaagcatggctgaactcatgataatatatgatcgatcttatcggccaactaccttctttattgggctgatcagcagcatcggcttgtccttgttttatataattatctaactgaga

SEQ ID NO: 4356 - DNA, 368 bp, Lilium asiatic
tcgcacaacttgtggagtctgaagtgcaaatgcttatcgaagctgtagatagtaacggaaaggggaaactggactacggggagtttgttgctgtatcccttcatctaaagaggatggctaatgatgaacatctccgaagagccttttcattcttcgacaaggatgggaatggctacatcgagtttgaggagcttcgtgaggctttgctggaagacgggaccgctgatatcacagacgtcgtgaatgacatcttacaagaagtcgatgctgataaggatggacgaatcagctacaacgatttccgtgcgattgatgaagacgggtaccgattggagaaaagctcacgacactactttggagggagattt

SEQ ID NO: 4357 - DNA, 205 bp, Lilium asiatic
ggagaaagctgtagtgatggagtctggaaagtatatccaagggagctgctgggcgtaagggcggggcgaagaagaagtcgataccgaaatccgtcaaggctggccttcaattccctgttggccgtatcacccgctacctcaagaagggccgctatgccaagcgagtcgggtctggagcccctgtctaccttgctgcggaccttga

SEQ ID NO: 4358 - DNA, 383 bp, Lilium asiatic
cccacgcgttcggctggcgagactagaggagtatgctagaagccttgttgaatccaaggcgagagaagaagcagggcggcttttgatcagaatgaaagacaggttttcaacacttttcagccgtgattctgattcaatgccaagagtctggacaggaaaggaggatattagaggaatcacaaaagctgcccgctcttcgtcgttgaagttgctatctgtattggctgcagttcgtttggatgaggaaagtgataacattggaaaaactctttcacttgctcttgtcgatactgctaatagtggtactaccgatagaagtatacaatcagttgacctactggctactagctcatgggaagaggtttcttcagcaaaaacattga

SEQ ID NO: 4359 - DNA, 168 bp, Lilium asiatic
aaaaaaaaaaaaaaaaaaaaaaaaaaaaatttttttaaaaaaaaaaaaaaaaaaaaaaaaaaggggaaataaattaaaaaaataaaagatacaaaaaaaaaaaataaataaaaaatacattttaaacaaattaaatttaattaaaaaataatcaaatcttttaatttt

SEQ ID NO: 4360 - DNA, 366 bp, Lilium asiatic
ggatcctcgagctccatctgatcgacgccatgggactccaaaacaccgagataatcggaaacatggatccgtacgtggcgattcaatacaggaatcaggagcacaagagcagcgtcgcccgagggcaaggttcgagtccgtcgtgggacgagacatttaagtttctagtgcagaatcccggcgccggcgggcagcacaagttggttttgaggatcatggacagtgacgcgctcacggcggacgatttcgtcggagaggcaacgatccatgtcgaagatgtgatatcattgggcatggagaaaggtataggtgagctacaccctacaaagttcaacgtcgttctttcagaccaaacttatcgtggtg

SEQ ID NO: 4361 - DNA, 233 bp, Lilium asiatic
cggacgcgtgggcttgaggagaaaacattttttatacaggcattggttatgaataaaagattgttctacctttccaagattagccagccaaccttgataatctggggagaccaagatcaaatatttcccttgcaattgttacacagattgaagagacatctagaggacatctcccaattaataatcataaaaaatgctggacatgctgtcaaccttgtaaaatccaaataatt

SEQ ID NO: 4362 - DNA, 71 bp, Lilium asiatic
attcccgagccgagccacccgttctagaatctttcatcactcatctaaagccttcacacttacaggcaacg

SEQ ID NO: 4363 - DNA, 385 bp, Lilium asiatic
  modified_base (240)..(240): a, c, g, t, unknown, or other
  modified_base (329)..(329): a, c, g, t, unknown, or other
  modified_base (338)..(338): a, c, g, t, unknown, or other
aacgagcatttttacaggtgacaataagtcaccaatggagaagcctgttaccggaacaggtaaaagcgtgtaatctactggacgtgataataagactataaaagcaccaaattctgttagacgtgatatgaccggcaaagcaccaaattctagtggccgggacaggattgcaaaggcaccatattctgctggccgtgacagggctagaaggccccctcccagaagttatcagcggccagnccaatattatccaagaggcccttcttatccagcaagggatccttatgtataaccactcatgcctgttgtacagtattctctaccggctnctgtttcgnattgtacttatgtaccttctgaggactattattacagtgcttagccc

SEQ ID NO: 4364 - DNA, 273 bp, Lilium asiatic
tctagatcacttcccggcagttctcatcatgtcactcttacattcgccaaaattcaatcagagagttcttatatagcgtgacaccccctaattaacctgaacccggctcacaacttaacacactagctaacacttgttattacataccttataactctaagaccacatctccctttagaccaacagagtaatagaatagatcccacaaccaatcaaccattccaaacaaatcgcactatgaatttcaattggaaccctccctacatattttac

SEQ ID NO: 4365 - DNA, 327 bp, Lilium asiatic
ggatcctcgagctccatctgatcgacgcctttggactccaaaacaccgagataatcggaaacgtggatccggacggggcgaggcaatacaggaatcaggagcacaagagcagcgtcgcccgagggcaaggttcgagtccgtcgtgggacgagacatttaagtttctagtgcagaataccggcgccggcggacagcacaaagtggttttgaggatcatggacagtgacgcgctcacggcggacgatttcggtggagaggcaacgaaccatgtcgaagaagtgatatcattgggcatggagaaaggcaaaggtgaggtacaccctacaa

SEQ ID NO: 4366 - DNA, 236 bp, Lilium asiatic
caaatgagctccccatggaggggaggatcaagggtctgatgccctctgttaacttgttgctgtggtactggtgaataatagaccatgagtttacatccatggcctctgttgtcttgtggaggtgttgctgattgattctgcacaaccggcagatggagctccagccctcgtctaacctttggcaactgagcattgtgggatcatacttcatgttggaaaggttgcattaagacatg

SEQ ID NO: 4367 - DNA, 277 bp, Lilium asiatic
  modified_base (10)..(10): a, c, g, t, unknown, or other
  modified_base (22)..(22): a, c, g, t, unknown, or other
cccacgcgtncgcccacgcgtncgccgccgtcttgatccgagctagggttctctccgccgctgccggaatgggtcactcgaacgtgtggaactcgcatccaaagagctacggccccggatccaggacttgccgggtctgtggcaattcacatgggctaatccgcacgtacgcactgatgtgctgcaggcagtgcttccgcagcaacgccaaggaaattggcttcatcaagtatcgttaaggtgactcatgcagcatactggtggggaactgacttct

SEQ ID NO: 4368 - DNA, 294 bp, Lilium asiatic
ggagatcaccattgcgttgtgcatgcatggtgctcggagaagaagggatgccaggcagaagacgagatctataaagccctaaggacgagcgatgaagttccccaagtctcagacgaagaagttcaccatttctctgagcctccttcatccaggaactctgcttagtgacagagtcgagttcggggaagaaggagtaggtagtagtcgtattctgttagatgatatgtattcttttttatctgcttgagttgtagtaagttagattttcattctctttcgtgttttagctttaga

SEQ ID NO: 4369 - DNA, 396 bp, Lilium asiatic
cccacgcgtccggcgacgccggcgaggctcctctctacttccttcagaaaatgacgacttgaaggcgccttgcagacaggaaaacagcaaaattccagaagaacattacaaagagggggtctgttcctgagacaacagctaagaaaggaaatgactatcctgttgggccaatcctgcttggtttcttcgtctttgtggtcattgggtcatctctgtttcagatcatcaggacagccacaagcggggggatggcctgaatacaaatgatagtgagactttcaaggctctggcagtacgaatttacgttacaatgttaacctgaatattagagatattatgttaagaaacttgggtgtgtcggtgtactctttttacctttatgacttgggttgaatg

SEQ ID NO: 4370 - DNA, 247 bp, Lilium asiatic
tgcccctccaactaatgatgcacctccggctctggcggggaagaagatcctagtccgctgcgcctgcgcaggttataccaaagaaggcgtgctgctcttcttgatcattctatgagtttgagttgtctttactatattttagttataggttagagctgaggtggttgcttgatggatacgtgtgtttaatatgaagaaagctgtaccggattgtttgagataaacaaatttatgtttcagtttaaca

SEQ ID NO: 4371 - DNA, 376 bp, Lilium asiatic
gttcctaccatccacaacattctacattctttcgtgcatgcctacgttatgcgtggattggataacaatgcacctgtgtacattctcactgacttaatatactttgaaccttactacatcattgactctgccaaagcctgcatcataccccacttacttggcgcatatcacatatacacccagcccgcatatgccaaatttgaagaatgcattgccagtagatacccgaactcaaaatctgttcaccacgagcgacctacgattaacacaagagactcaaaattcagtatcaactcattcagatctggctggaggaccatcttcgtggccttagtcacactgatggtcatattgctgtctttctttaacgacatac

SEQ ID NO: 4372 - DNA, 112 bp, Lilium asiatic
ggttagatcactagcggcctctattttatcaagcttacttaccgtcatgcagatcattttcatatatatgtgacctaaattaattactgccgtcgtctacaacgttcaactg

SEQ ID NO: 4373 - DNA, 336 bp, Lilium asiatic
cccacgcgtccgctggaggttgagagttctgatactattgataatgtgaaggcaaagattcaggacaaggaggggatccccccagaccagcagaggctcatctttgctgggaagcagcttgaggatggccgcacccttgcggactataacatccagaaggagtctactctccacttggtgctccgcctcagaggaggcatgcacatctttgttaagacactcacagggaagacaatcaccttggaggtggagagctctgatacaattgataacgtgaaagctaagatccaggacaaggaggggatccctcctgaccagcagaggctcatctttgct

SEQ ID NO: 4374 - DNA, 408 bp, Lilium asiatic
cccacgcgttcggcggtggtggacatggcggtgcgcttttctcggacacggagggtcacatgaaatgtcacatggtggaggttacggaggttatcctgggcacggagggttctcaggacatggaggttatgctgaacatggcggtcacggtcacggcggtcatggccatggcaagttcaagcatggaaagttcaagcatggaaagcacggccaccatggcaagttcaagcatggaaagcacggccaccaccattgaacatgttaccatcgcacttgaacttgttttctagtacagatgaaatccccctggactgctaccagggggtgttggtgctttggttatggactggcctgctaggggttgccttaaagcttcatgaataaaatctggcctttttggtggggttt

SEQ ID NO: 4375 - DNA, 180 bp, Lilium asiatic
ccgaaaccgtctgctaatcacggggaggaggagtcaggcgaggcggaggcggagcattcgccaccaccggcgcaggatttgcttagtatatgatgtcggcttgtagcttttggcttattattattattagttcgaagtgttattaaggagatggttaactaacaatgtaccttggcttct

SEQ ID NO: 4376 - DNA, 247 bp, Lilium asiatic
  modified_base (225)..(225): a, c, g, t, unknown, or other
gcgggaagtgctgccccaaggataaggcgatcaagaggtttctggtgaggaacatcgtcgagcaggccgttgtgagggacgttcaggaggcttgcgtttatgacggatacactcttccgaagctgtatgcgaagattcagcactgtgtctcctgcgcgatccactctcatgttgtgagggttcgttcccgcactgacaggaggaaccgtgagccgccacagcggnttagacgcagggaggatacccc

SEQ ID NO: 4377 - DNA, 354 bp, Lilium asiatic
aatatttgcatatacatgaatgggatagcttttctattggaatattttgcctgtcaccgagggctgtgattgcactccataatcatcctggaatgactgtcctgagcaagctctttgtacgggtcattggatgtgaaatcatatgattggattgatacaggcagaacctttgatccgtcagaagcgaggcctgctaaactcgctagggactgcgaaatgtctgcaccctgcgggacgacagagctttatcctacagtcggcggttacattcactctttcaaggcgataacacattgagctctgtttgacatttctatcgccaccttattcatcagaggacggacgccactgttc

SEQ ID NO: 4378 - DNA, 331 bp, Lilium asiatic
cggacgcgtgggtgtacatatccattttagttaagaattctgcataaaaataaatacaaatgatcttgaactacgacatctgctcatatatataatatatgtctatgttttacaataaacaataaaaaggaggattttcaatgcgagatataaaaacatatctctccacggcacctgtgctaagtactctatggcttgggtctttagcgggtctattgatagagattaatcgcttattcccagacgccttgtcatttccttttttttgattctagctattgatatgcaaaaaaataaaaaaattagggatttaattctatgtgacgtgatt

SEQ ID NO: 4379 - DNA, 144 bp, Lilium asiatic
ggccaatacttccttctactcgcgcgtttaccattgacctccttctttcgctcatcacgaagatgtataaatcaccacctggccttcctcattcattctatttctatttctaccttccttctcactaacttcaccaattgtttt

SEQ ID NO: 4380 - DNA, 381 bp, Lilium asiatic
  modified_base (115)..(116): a, c, g, t, unknown, or other
  modified_base (118)..(118): a, c, g, t, unknown, or other
  modified_base (121)..(121): a, c, g, t, unknown, or other
  modified_base (165)..(165): a, c, g, t, unknown, or other
caatgttgatgatgaacactgaggatggttagagggactgatgggctttcacttaatagttgatcgagtcctctcaatcccttccagatatgtaaattgagccattgctagtgtnnanagnttctagtgtgcaaaaatttatgcttcctgctttatatttagtanttaccgatcggaggagctttgctcaagttgtggattcgaagtcactagaaacttttagtgctgccttcttgtgtggcttcgtgctcaagtcgtctttttaaagtctgtagaaactttagtgctgccttcttgtgtcagttgtttatctttcttttgtcggtgcccttaccctgtaaggttgttatcagtgtaattgacaagtcaagatatgctatg

SEQ ID NO: 4381 - DNA, 284 bp, Lilium asiatic
agatcgttctcggagagcttgtgcagctccatctcatgatatccgagtctatcattcggtgggcgtactgcacgcagctgccaaatgcaccctctcttaggtcctcccttgtctgttgagatatcgactgcttcttgtaacccagttcactctctcttaggtcctcccttgtctgttgagatatcgactgcttcttgtaatccgggatgacattatcgtaatgggattgtaaattgaatttaaaaaacccatatagttgctaatgatttactgaactttagttg

SEQ ID NO: 4382 - DNA, 372 bp, Lilium asiatic
tcgcccacgcgtccgagatgttcgtcctgaagatgtggaggatgctaatttttgagattatgaaggtcgaagccggcctttctgggaaatagagttggtggctgctaccagtgagcttctagcaatcaggttcgtgcatttttccttgttcagcatgaaggtactctgtgtgtcttcccaatcttcatttagagattagttgagcttgttggtgattcagtgttttgcagcatttttgtgaagtcactgatcagtcatgtactttagagcggatagtccttaatgtcaggcttctgttttttctggtggattgttatagcttaccttttgttaaatggtatcattagaaacttgttgaaaacaattttacat

SEQ ID NO: 4383 - DNA, 373 bp, Lilium asiatic
ctaggtcaggcaggggattttctctggaggagctgaaggcagcaagcattcccagaaagcttgccccaaccattggaatttctggtgatcaccgacgcaaaaatcgttccttggagggccttcaagccaatattcaaaggctcaagacctacaaggccaagcttggcatctttccacgtcgctcgcacaagttgaaggctggtgattcttcaccagaggagctagcagctgcaacacaagttcagggcgcattcttgcccattgctcgtgagcagccaacggttgagattgtgaaggtgacccatgagatgaaagctcttaaggcatattgcaagcttcgtgttgagcgaatgaatcagaagcagattggtgc

SEQ ID NO: 4384 - DNA, 251 bp, Lilium asiatic
ggaagatgaggggaaagagaggcctctggtatttcggaacaaggcacccaggtggcacgagcagctacagtgctggtgtctcaactttcgtggcagggtgactgtcgcctctgtcaagaactttcagcttattgctgctgcacaaccgccagctggagctccgaccccgtaccaacctccgtcacctgagcatgataagatcatactccagcttggaaagcttgctgaagacatgttcaccatggactatc

SEQ ID NO: 4385 - DNA, 197 bp, Lilium asiatic
gatactccaagccctagaatatgaaaatgatcatggaatggatttggatgaatttttccaggcaactgtcttgaatgtttcaaaccctacctttcttttcttttttctttaatgattttttttctcattcatactttcttctctttttctcttcttcatctccttcctttttcttttatttctcttttttatttttc

SEQ ID NO: 4386 - DNA, 263 bp, Lilium asiatic
cggacgcgtggggttaagacttcccgaatagttcgtcaccgggagtactggggtcagaaagtaaacttacttcaccttagctgagctgttgcttgggtttgtcgttttggctgcatagtcagcattgtgtaaatataggggtggttttggtcagcatctactcttcttgccctgctgcaatgaaccactcacaattaggtcggcatccttgtagtggagcttggatttgatatgtattaaaagtgtttaagcatgtggttacc

SEQ ID NO: 4387 - DNA, 66 bp, Lilium asiatic
cggacgcgtggggttctgttagactctcatttacgttttcaattattacccagacttttgcagatg

SEQ ID NO: 4388 - DNA, 386 bp, Lilium asiatic
cggacgcgtgggttccaatgggcctcgtaagagggtgccctagctgaagagaatatgcgggggatatgttttgaggtctgtgatgttgtgctgcatgctgatgccatccacagaggaggtggtcaggttattccaactgctagaagagttatttatgcctcacagttgacagcgaaacccaggctgctggaaccagtttacttggttgagatccaggctcctgagcaagctcttggaggaatttatggtgttctcaatcagaaaagggggcatgtgtttgaggagatgcagcgacctggtactcccctctacaacatcaaggcttatctgcctgtcgttgagtcatttggtttctctggtgctttgagggcagcgacatctggcca

SEQ ID NO: 4389 - DNA, 260 bp, Lilium asiatic
  modified_base (88)..(88): a, c, g, t, unknown, or other
tcggcactctttcttccaaccccaatttactctaaaactctgatggcgcccaagtctgaagaaaagctcttagagaagaagccggtgncctaaaatcccgccgccgaggaggagaagaaagcggccccagccgagaagaatccgtccgtgaagaatcccaaggctgggaagaagcccccggcctccaaggtcaaggtgggggagaagaagaagaagaagaggtcgaagaagtcggtggagacctacaagatatacatctt

SEQ ID NO: 4390 - DNA, 57 bp, Lilium asiatic
agaatatacccgccagcaggacgatcgccttattatctctcggtaccagcagtctta

SEQ ID NO: 4391 - DNA, 153 bp, Lilium asiatic
tcgagattctgaaaacaatcattgatgatcctgagtacttcatcgaggatggtgcatggtagcttctgtatatggaggtaagagattcatactctgatcacagtcatactacggatcaagcatacaagccatctcatatcccaacttaatctg

SEQ ID NO: 4392 - DNA, 299 bp, Lilium asiatic
tggaagagctgaggaagcgggctgatgctgtcttgaacgacaagtcagtcaaggaccttgtggtgctgctgcttgagactgcactgctcacctctggtttcagcctcgatgagcccaacaccttcggcaacaggattcaccgcatgttgaagcttggcctcaacattgacgatgatgaggtatcagccgatgctgcggacactgagatgcctcctcttgaggaggatgctgagggaagcaagatggaggaggtcgattaactgatgagaaccattgaggggagatggtagcttctatgc

SEQ ID NO: 4393 - DNA, 441 bp, Lilium asiatic
gcgatttacctcaaaaatatttgtctccggtcgatatgtttgagactatatgttccagtacactccggtggtgacggcagctcggagggcatgcatgcacatctctatatctgatgtatcaaagtcgttgcggcatctgcgatacatactacatcgcccatgtgaagaatgcgcaggacgacttgaggtccttcgcatccacatgaggaatataaagttatctgaagaggttgatttggaagggataggcaaaaacacacatagatatgtgggtgctgatcttgcggtcttgtgttctgaagctgtcctttagtatattagggaaattatggttttgattgctttagatgtcgctacttttaatttctgctaggtttgaattttctgtcctattagtcttcttgctttttagttactcttctaagaatcaatattctctct

SEQ ID NO: 4394 - DNA, 269 bp, Lilium asiatic
  modified_base (116)..(117): a, c, g, t, unknown, or other
  modified_base (120)..(120): a, c, g, t, unknown, or other
  modified_base (239)..(239): a, c, g, t, unknown, or other
gccacgcgtacgcgttccttcgatacttttaatactgcggcatcctctacagcggctggcccgtcgtgaagccctgcgacggcctcaacgcctgctgcaagaaccacgacgcctgnnttnaggctcaccacaatgagtatttgagccaggagtgcaacagcaaatttctggactgtatggaggccgcgagggagttcgctccgccaaccttcaagggcaacacgtgcatggtggtggangtgattggtcttcattgccctcgttatcat

SEQ ID NO: 4395 - DNA, 182 bp, Lilium asiatic
accacacgtactaccgagtgtattttttatcataatgacgcacatgcactctcatctagaatttttttaaatgaggatgatactccaactttttattcaactttctattccaattgcaaagccactgtccaaaacctcctcaaaaacttcaacctttttgttccaccttccaatacgattcc

SEQ ID NO: 4396 - DNA, 305 bp, Lilium asiatic
tcggccacgcgttcggccacgcgttcgaccaattttaacattatttgacttcgaagactttgataagggtgcctgcttggcataacattctcaaggtataaaaaggagtgggacatattctggagaaaattatatacttaggcgaaaggggcttaaggcggtggattggaattattccactggagaaggggaagaagcttatgcaaacttaagtgaagggagaggtaaaaaaggacggcattttcttgcggaagaaggtaagggctacgagtacaagaactctaggggattgaaagaggatacac

SEQ ID NO: 4397 - DNA, 342 bp, Lilium asiatic
ttgctttccttttaatctcgagcttacatttgtttcccccctgcaaattgcatgatggacgacgaggatttcacgcatacgaggaaggagatcaagcaccgatgatgcatgaaccaagggcagaaataagcagaaggcaaaggagggctgtgatgatgagaagtacatggagcagattacatcaagcggagaagaagaaggccgcgcatgaagcttctagaggcgcatgtggaaggagctctccattggacgcgcatgtgaggtgctcgaagcagaagagatgcgaggccgaagttcacatttataaaagcccctagccaagcaacgaacatcccaagcctt

SEQ ID NO: 4398 - DNA, 305 bp, Lilium asiatic
tccacgcgttcgcccacgcgtacgcccacgcgttcgggatgcttcaattagtagtagctttattttctaactgatgcgtgttgtaacactgattgattttggtgttttaagtggtatcacatttatgttaaaaaaaaaaaaaaataaaaaaaaaaaaaaaaataaaaaaaaaaaaaaaaaaataaaaaaaattaaaaaaataaaacattacccaaaattaagaataactttatgtgtaatgaaacataaatttgtatttgtttaataattaataaatatatttattattttattatatctttttt

SEQ ID NO: 4399 - DNA, 349 bp, Lilium asiatic
gaacgcccgccggtctccaccagcaaaactttatcgtcgtcgcgcccgctttgccgccgatgcagtcgccgcctccgtcgacagtgccccttcgccttcccgaattccatgatatgttctttcactccttggctttatcatgtgtggcggtaattggcaactcggagctctgtgtgttgcaatgtgggatcttggcttgcaagtgattacgattgtaatctttgcttttatcaaacaacttgttatctagtccgtttaatgtttaatgcttgaggttgtgtcctatgtcttatgagttaacatgtccttagatgctagggtgacatcgctttcagcttttgttgtaata

SEQ ID NO: 4400 - DNA, 300 bp, Lilium asiatic
ctctttttcgcccaagaatctgtcctagatgttggtggtgctgtcccctaaatgtagctcagaagtcgagtgaccgcgattatggcctcccagtgtccatgaccccctccaactcgagcgaagaagtcgtgcatctcctcaccgacctcaaaatcgaattcacctctcctccccccgatggtgggtcgccggtatggaagcttgacagcttcgagcccaacggccaacgatatgtgacactcaatggtgatccaaataactccattgatgagaacaactgcttcaagattgaaaaagccg

SEQ ID NO: 4401 - DNA, 223 bp, Lilium asiatic
ctctttttcgcccaagaatctgtcctagattttggtggtgctgacccctaaatgtagctcagaagtctagtgaccgcgattatggcctcccagcgtccatgaccccctacaactcgagcgaagaagtcgtgcatatactcaccgacctcaaaatcgaattcacctctcctccccccgatggtggcttcgcgttttggaagcttcccagctccgagcctaacgg

SEQ ID NO: 4402 - DNA, 136 bp, Lilium asiatic
  modified_base (118)..(118): a, c, g, t, unknown, or other
cgttcacttgagcagcgatgtcgtgacgtttcatgggcggtaaggggctcggaaagggcgaagcgtatcgtcaccgcatggtcctccgcgataacatccagtgcatcaccaagccgtncatacagcgcctcgcccg

SEQ ID NO: 4403 - DNA, 316 bp, Lilium asiatic
cgttcctgctggcatacaaggaaacactgcttgttacgcaaacaactacttcagagctgatggccagaatactggcaacttcctaacggatcgtccttccaccaaggttcatgctgcacctggtggtggttccttccttggctacctttttggtggcggtagcaactgatgggactttctatgctgctttagaactgcaccaagtgtttgctgttttttagttgttgagtttctttatcattttatcctttcccaagtttcgtttcagtgtcttctcgtctcttttgttcgtcctctttcgctcttcttctttttt

SEQ ID NO: 4404 - DNA, 291 bp, Lilium asiatic
  modified_base (264)..(264): a, c, g, t, unknown, or other
cctaaaagcggagtctgcattacgacagaaggtttataagaatgaaatactccaacataaacttcaacagtattagacccgttgttcatagtacgaactcaaaatgcgaaccatggaagaggtctgtcataagcagatgccatcattacagtccagtctctcgattgcaaaacgaaccctattctccgatgaacctgagctcaagtcttttgcatctgttgaacaaagctgtgacaacactatcgtgaaccacaatggtacagnatttgatgaaaccccttcactcccctt

SEQ ID NO: 4405 - DNA, 178 bp, Lilium asiatic
ggatgccaggcagaagacgagatctatttagccctaaggacgagcgatgaacttccccgagtgtcatacgaagaagttcaccacttctctgagcctccttcattcaggaactctgcttagtgacagagtcgagttcggggaagaaggagtaggtcgtagtcgtattctgttagatgat

SEQ ID NO: 4406 - DNA, 305 bp, Lilium asiatic
gttttactggagaagttccagaggcatgatccttcggtaatgggaaagatcaagggttgcattgtggattctgcacctgttgccgcccccgatccgctggtttgggcttcaggtttctctgctgcaattttgaagaaacagagtgtcgcaacaaaaagttacccgagttcagatgtgatggcaactgtggattctgaagttcaaccgaagccagcaatagcagaaactgcattgctagtcgttttggagaaattttttgaggtggtcctcaacctttctggtattagcaggatgaacgatttttt

SEQ ID NO: 4407 - DNA, 259 bp, Lilium asiatic
agacgatctactagagaaaaaatatctatcatttcttcgaatgatgtattataccttcaggaacatgagtttaattttgacatgcttgaaaatgacccaattaatttcaaacacgtgatagaaaacttaaactctcaaaagggaatcgataccataaataaggaaatgaaatcaatgattgacaataatacttgggaaattatcccattacctagaggttaaagacccattttttgtaaacgaatttttaaaaccaaaa

SEQ ID NO: 4408 - DNA, 240 bp, Lilium asiatic
tgccattgaggcggcgattcagtggcttgacatcaatcagcttgcggaggctgatgagttcgatgacaagatgaaggagctcgagagtatctgcaatcctatcattgctaagatgtatcaggcttctggtggtgtgcctggtggtatggatgaggatgatgagggtcctgctcctagcggcagcggtgctggtcctaagattgaggaggtcgacttacgtgagagaagttggcatttatc

SEQ ID NO: 4409 - DNA, 377 bp, Lilium asiatic
cccacgcgtccgctcactaatggcgcccaaggccgagaagaagcccgcggcggagaagaagccggccgtcgaggaggagaagaaggcgcttccggcggagaagaagcctgctgagaagaagcccaagggcggaaagaaggtcccggcctcgaaggagggggcctctgacaagaagaagaagaggtcgaagaagtcggtggagacctacaagatctacatcttcaaggtgttgaagcaggtccaccctgacatcggcatctccagcaaggcaatggggatcatgaacagcttcatcaacgatctctttgagaagatggcttaagagtccgcccgccttgcttcgtacaacaagaagaacaccatcaccctttcgggag

SEQ ID NO: 4410 - DNA, 248 bp, Lilium asiatic
tcagttccccgtgggccgaatcggccgctacttcaggaagggccgctatgctcagcgtgtcgggtctggcgcccctgtctacctcgccttcgcacttgagtaccttgctgctgagctgctggagctggctggaaatgcggcaaaggataacaagaagaacagcatcataccgcggcatattcagttggcggtgaggaatgttgaggagcttgtccgtttgctgcttgtattcactgattgttcatgtt

SEQ ID NO: 4411 - DNA, 296 bp, Lilium asiatic
cattgatcagaataagagtgatatagtgcctttatccaaccaaagatttggttcaaatattgcagcagtggataaaagaaagtttctcattaacacgctaatggaccttaaagattcaaaagaagctgtttatggtacactcgcttcttgcgttgcttgggagcaaaactttccattagtttctttgaagagagcattactttttcttgaaaaggagcagcaatggcatcgagttgttcagactgttaagtggatgttaagcaaagggcaagggactactgtggtaacatatgcac

SEQ ID NO: 4412 - DNA, 146 bp, Lilium asiatic
gttggtaaagctggcggagaaaagtgttatatccgttgtccaaagctgacaaagctccatagaaagtcttcgctgcaaaaaggcaccttccatatgaaaagcaaatgtcagcttacaacaagaaacaggaaagctgtcctgagcct

SEQ ID NO: 4413 - DNA, 292 bp, Lilium asiatic
  modified_base (111)..(111): a, c, g, t, unknown, or other
  modified_base (128)..(128): a, c, g, t, unknown, or other
  modified_base (165)..(165): a, c, g, t, unknown, or other
  modified_base (183)..(183): a, c, g, t, unknown, or other
  modified_base (250)..(251): a, c, g, t, unknown, or other
  modified_base (283)..(283): a, c, g, t, unknown, or other
gagaaccacaccatttactcttgtggtcaccttcccatacggtgccacacaagcagaagctagagggaagtggtttgtcgacgatgatgaacggcctgagatgaagctcgnggatggagaatcgtcgnacgtcgagttctatgctgctgttagtgggaatgcggngaaggtgtggtctgcagntgaggcaggggaatttagtttgcagaagagattgttgattgagaaggtggttgtgttggggttgggnnggaagggctcggggcttaagatggagggtganggggagcct

SEQ ID NO: 4414 - DNA, 393 bp, Lilium asiatic
cggacgcgtgggcggacgcgtttgcggattattaagagccgtaaagttttgggtcatcagcttttggtgatggaatgtgttgagcaccttggacgcatgttcaagcctgacttcaaggtaatcaagaagcggatagaacatctgatcggcagagaatatttggagagggacaagggcaatcccaatgtattcaaatacttagcctgatagacgcaactgatgagcctgcccggaataaaatgcaagaagcactaaacatgtagtggctggaaaattagagtataaattcttccttgtacattcgcatctgtagtctggagataaattgactcggatagagaaaagtttagaatttgaaaaccctcatgagaccattcgtcctgcgttttggta

SEQ ID NO: 4415 - DNA, 240 bp, Lilium asiatic
aggagatcaagaacgggcgcctggcgatgtttgcgatgctcggtttcttccggcaggcctaggttacaggagaagggccagtggagaacctcaacaaacatctgagtgacccatttggaaacaacttgctcactgtgatctcaggaggggctgagagagttcctaccctgtaattttcttcattccaattccaacaccccttgggttgtaaatttaatgagatcacggaaggcctgtggt

SEQ ID NO: 4416 - DNA, 279 bp, Lilium asiatic
gcgtccggcatcagctgccttctcacacccatgtcgtttcacgtatgatgctgcaagagcctctagggtgtctgcggggactctcttttgaaactataaagctcctttctgcgagcagtgccatctgatcaaggcttccttaaaaataatgaatttgttggacccaatcgtctatagcttagttttttgagattatctgtcgtcttgtttgcaatcttaatttttataccatttgttcgaatatttgaaaattcaattattgttcattttgacagttgt

SEQ ID NO: 4417 - DNA, 266 bp, Lilium asiatic
attcaaataattcatggagttggggaaaaagtacctgtgagttgtcattgcacgacttgtctgtggtgagaggggactctgacagggtctttgtttactattgtgataaaaagtttcaaccctaaattagaaattatgtcaaatataaaatctctaatcaaagataactattacatcaatggagctcagctactgcgatacggtggttgtggtcggcacgttgccgtgagagagatggatggagctcatcttcgacaattgtgttt

SEQ ID NO: 4418 - DNA, 311 bp, Lilium asiatic
ccgctactctgctcccaaagaaattagggcaatatcaccgtcagctccctcatcatgtccgtcgtaatcgctgtcggccgtctcgctgaggagcgcaaatcatggcgcaagaaccatccccatggtttcgtcgcgaagccggagacgctgtctgatggctctgttaatttgatgttgtggcactgcactattccgggaaagaatgggactgattgggaaggtggttattttcctctgacactgagcttcagcgaggactaccctagcaaaccctccgagtgcaagtttccaaccggcttctttcatccaaa

SEQ ID NO: 4419 - DNA, 193 bp, Lilium asiatic
atctctcttctcaaggccaatgattacaaccaatttttctacacccttttcttccgcaccgtcttcatcttgaaagctgtcacggactccatcatcagcatctaccttttctacctgcatggcaacgtcattggaatccccaacctttatgcgtttatccgcttttatggtatcttattacaactacttctat

SEQ ID NO: 4420 - DNA, 419 bp, Lilium asiatic
  modified_base (89)..(89): a, c, g, t, unknown, or other
atcgatttttttgataatgtctgggcgcggcaaaggcgggaagggtctcggcaagggcggctgcaagcgccggcgcaaagtgctgcggnacaacatccagggcatcaccaagccggcgatcaggcggctggcacggcgcggcggcgtgaagaggatcagcggcctcatctacgaggagactagaggggtgctcaagatctttctgtagaatgtgatccgtgatgctgtcacctacacagagcatgtactccggtagacagtgacgttgatggattttgtgtattcttttaagttctctgtgctcacttctttatttgtgtgtgtggggggtgttattctataattttattttttataaatgttatttattcgttccttctttttttattatcttatttaacctatcttctattcttttt

SEQ ID NO: 4421 - DNA, 232 bp, Lilium asiatic
  modified_base (61)..(61): a, c, g, t, unknown, or other
  modified_base (105)..(105): a, c, g, t, unknown, or other
gcgtccggggattgaagctggaggcttatcttaaagcttctgagccacttaggagtgaagncatggcgcgttcgtcttggcttcataactttgcatcccccaacnaagagcttgctgggcaggttaagaatctctctcatgagctgcctagggcacaggcggataacaagcaggtgccgcttatgatggcggagattgaggtgatgcttcaggagattattcattccaggac

SEQ ID NO: 4422 - DNA, 401 bp, Lilium asiatic
cccacgcgtccgcccacgcgttcggtcggagctcattcacgatgtccggcggggccctttccgcatcctccctcttctccggcctactctccggccgccagctgcagcagccggcgctccatgtcccgcgccgcggttaccatatcgatctcggcgctcgagagaaggcgctcttggaggaggattcagcattgaagaggttcaaatcttacaagaacaccgtgaagcgcgtttcgaaagttggggacgctcttacgattctcgttgtggctgcatgcagctatgacatctatgcacgagcagcgagaaaatcggcaaactggtagtgcgcgtgtactcatttagaccttcaattgcgtctgatgttacgggggaataatagacaatgatgttgaaaataa

SEQ ID NO: 4423 - DNA, 353 bp, Lilium asiatic
  modified_base (348)..(348): a, c, g, t, unknown, or other
cggacgcgtgggcgatgaagggctctgatttgatgaagtacatggagcagctggcatcagacgtactcaagggtgctgcagcttgaagcttctggaggcgcatgtggaagaagctcgccattggtcatgcatgcgagttgctgggagaagaaagggatgccagaccgaagttcaagcctataaagccccagcccgagcgaaggtttctcccaagcctcagaaggagaaggagcacgactctctgctgctgagcctccatcccctaaaaactttccttagtgacagaggataagtttgaaggagatggagtagataggggagtaacttagcttcttgtttaattctagntattt

SEQ ID NO: 4424 - DNA, 299 bp, Lilium asiatic
tggcattcttctttgcgcccacttagacttgtcacggctgcctatcaagaaatggtttgtttgagatgctaagtaataccttatctacttttcctctagcttttctgtacaattaaatactttttttcaaagactcatggcattttgtttgcatttacttactcttttcaatactcttgactcacatgtaccacatccgtctttttcaatataaaatatatttttccttgtttattattatttattttttttttttctattcttcttttattttttttttcatttttttattatctttt

SEQ ID NO: 4425 - DNA, 529 bp, Lilium asiatic
  modified_base (40)..(40): a, c, g, t, unknown, or other
  modified_base (63)..(64): a, c, g, t, unknown, or other
  modified_base (73)..(75): a, c, g, t, unknown, or other
aaaaaaaattttttaaaaattaaaaaaaaaaaaaaaaaanttgaaaaaaattgttaggttttnnagggaaaannnaaaaaaaaaaaaaaaaaaatattattaataaaataaaataaaaaataaaataataaaaaataataataaataaatataaaaaataaataataaaaaataaatatataataaaaataaaaataaaaaaaaaaaaaaataaataataaaaaaatataataaaaaaaaatataataaaataaaataaataaaaaaataaaaaatattattaaaaattaaaaaatataaatataaataaataaaaaaataaataattagatagataatataatatataattattaaaaaaataaaaaatataaataataaatataaatattaatataaataaaataaaataattaatataaataaaatataaatataattattaaatatattataaaaaataataaatatataaaatatataaaaattaattaattaaatataaataataaaaaaaatataataaata

SEQ ID NO: 4426 - DNA, 374 bp, Lilium asiatic
cttgaaaggatttttgtactgcatccagaaaagaggatgaccgttgctcaggcattaagtcgtgcattcatgacggcgtggggcagtcgatttaaagaccttcctacatggcagttcttatcagtgggatgtgttctgttctcttggtttcgtccagggctatgatgataacacccatgttttaggtgcctgaaggcaaccaaaagaagccatgttgcagcggagaggatggatcaattgcttgtgcagtgagaatttagcacggttaggttcgaactcgatatgtgcatattcggtcaggatattggagtataatagaatcccatgtagggaatacaataaagttggtttaaaatgtgttatatacctttaat

SEQ ID NO: 4427 - DNA, 286 bp, Lilium asiatic
  modified_base (28)..(28): a, c, g, t, unknown, or other
gaaccatcattggtccacacaacactgngcattaaggacgaatctatcagctggggctatttgtcgacaaagattacccggagaagcctccaagcgttcgtttccactcccgaatcaacatgacatgcgtgaaccatgagactggagtggttgacccgaagaagatcgctatgttggcaaattggcagcgtgactacaccatggaatacatactcactcaactgaggaaggagatggcttgtcatcacaacctgaatatctttcatccacctgaaggcaccatctt

SEQ ID NO: 4428 - DNA, 444 bp, Lilium asiatic
gagcaatccaggtgaggtaaggggcgagggaagtaccgcatctcaatccaggggcagagcagggcgctggccgtgctggaggctatttgaggtcatgaaggctgggtgcatcacgggctcgtagttttccggctccgggagaaagatatataagcactggaggctattaatccggctgttgctgatgaggtcatgaaggcggggtgcatcaagggctcgtcgatgggatttccagctcctgtagtggctgcggatcggattcaataatgttaatatagaggtgatgagatagctaacaatctgggtgctcgtcaaaatctcaacatatctcaagatcaagcgacacatgagacgaagacttgtccactgaatcaatttcttttctgatggaacggaaacacaaaaacacatggatttattggtactgttagtgcgagataactt

SEQ ID NO: 4429 - DNA, 202 bp, Lilium asiatic
  modified_base (75)..(75): a, c, g, t, unknown, or other
  modified_base (99)..(99): a, c, g, t, unknown, or other
  modified_base (123)..(123): a, c, g, t, unknown, or other
  modified_base (125)..(125): a, c, g, t, unknown, or other
  modified_base (128)..(129): a, c, g, t, unknown, or other
gaaaaacagggacgacccacgcgtacgatgaaaattaggcttagaatggttttctccatgtcctcaacaacctanaacttgtagattttgttcagcctncccaccaccaccacctactctcgntncgnntccctcaccctcttcaagggggccaactcgagcccacgccccgtgtttttttttactcccttttttttttttt

SEQ ID NO: 4430 - DNA, 296 bp, Lilium asiatic
cgcaaagcctcatattgacaagatctcttccttcacaaaacctcatgtagagaacgtgtgtgctgctttgaagccttacacagagcatctagtccatgcttacggggagtttctaaaatctgcaacgttgtatcatcagcaggccgtagctctcatccaggagaatctaacagattctctagcaaccaaagagttgtgctggtttatggcctttgcattggtggctctttacggattcgttctctacagaatcttttgggtcattgtttgttaaaagactaggttacctacaatga

SEQ ID NO: 4431 - DNA, 263 bp, Lilium asiatic
gagtcatttgctctagtcatgctagagactaatatcccaacacccgaagtatcagagttgactgatcaggctgtgatggaagacaaatgtgcttcagccccaatttgctttgtagctcttcttcccgatatattggattcaaaagcagaaggaagaaacaagtacctagacatgttgatgtcagttgctgagaaattcaaaaggagcccgtacagctatgtgttgtccgcggcagggaagcaggctgatctcgataaataagt

SEQ ID NO: 4432 - DNA, 356 bp, Lilium asiatic
gcttgcttcaatggcgatctacctccgatccctcgccgccgccgtcctcctcctcggccttgccgccgacgccgagtccatgtccgactcctccgcactggaatccgttgccacgtcggtccacgacgtcctcccccagtacggcctccccaagggcctccttcccaactccgtgaagagttactccctcagcggcaacggcgagttcgagatcgaactctcagccccctgctacgtccagttcttcgaactcgtctactatgagcgccacatcaaagggaagctctcttatggattgatctccgacctgtccgtcatcaaggctaagaagctcttcgtctgggtgcccgataccg

SEQ ID NO: 4433 - DNA, 171 bp, Lilium asiatic
  modified_base (93)..(93): a, c, g, t, unknown, or other
cccacgcgtccggttccgcacttttggacctgtgacccgtgtctatgttgctgttgatcagaaaactgggatgagccgtgggtttggtttcgncaactttgtgagcagggaggatgcagagagagctattaacaagctcaatggtttttgttatgataatctctcccttag

SEQ ID NO: 4434 - DNA, 246 bp, Lilium asiatic
cagggtttcagaaaattccaattgaagttaatacctactcatgttgaaatttgattggtgcggttgcttggttgttacgtcacggctcctcgttcgatcaccacaggccggcaatcccatttataaaaggacctcttgtgttattccccaattcaccaatttttcgcatcaaattttcaagccgattcgagatgcacatcttcgtgaagaccctcaccggtaagatcatcactcttgaggttgaga

SEQ ID NO: 4435 - DNA, 196 bp, Lilium asiatic
  modified_base (167)..(167): a, c, g, t, unknown, or other
cggacgcgtgggctgagatgaaagctgttacttattgttctaagtggcaggaagagcttaggaacccagattggcatccttttaaagttattatggttgatggaaaagagaaggaagtctttgaagaggacgactagaagctacaatctttgaagaatgagcttggngatggtgcctttaagggtgttaccacggc

SEQ ID NO: 4436 - DNA, 415 bp, Lilium asiatic
  modified_base (402)..(403): a, c, g, t, unknown, or other
gcccctctttcccgtcgcatcaccggccacccgcaaggcgcatcccagcttcaacgtgtcggcctcgggctagcagtatcgatcctatctgtggcatgggcgggagttttcgaacggtacaggaggaattacgccgtcaaacatggcttcgaggggctatttttgagcccgatgcccgatctgagtgcctactggttgctgatacagtattgcctgatcggaatagctgaagtgttttgcatagtgggtcttttagaggttctctatcaagaggctcctgatgctatgagaagcgttggatcggcttatgcggctgtggcgggaggtttgggatgcttcgtggcgacgattatcaacaacattgtgaaatttgcgacggggaatgaatttgagggccgaccnncatgggttcttt

SEQ ID NO: 4437 - DNA, 151 bp, Lilium asiatic
ccaagcggtcggttaatttggcggtggcttaaaaggttggaaccgaagaggtcaaggggtaaaattaaaagttgggcttaatttggtgggggcttaaaaggttggaacctaaaattttaaagaggggggagcctttaatggtaggttggtt

SEQ ID NO: 4438 - DNA, 340 bp, Lilium asiatic
gagaaacccgccgccgcagccgccgctccagtctccaattctccgtcgccatgtcgaggaagaaggtgcgagagcccaaggaggagaatgtcacgctcggtccgaccctgaaagatggcgagcatgcgttcggtgtagctcacatcttcgcgtcgtttaacgatactttcatccatgtcactgatctgtctggaagggaaactcttgtacgcatcacgggtgggatgaaggttaaagctgacagggatgagtcctccccttatgcagctatgcttgctgcacaggatgttgccactagatgcatggaactaggcattacagcactgcatattaagctcag

SEQ ID NO: 4439 - DNA, 95 bp, Lilium asiatic
tggcgggatgttagggagttgcttgagaaaatagtcggggagagtatgttgtaggttattatagaaggagttaaattcaatggagataacgaagg

SEQ ID NO: 4440 - DNA, 190 bp, Lilium asiatic
cgcaaagcctcatattgacaagatctcttccttcacaaaacctcatgtagagaacgtgtgtgctgctttgaagccttacacagagcatttagcccatgcttacggggagcttctaaaatctgcaacgatgtatcatcagcaggccgaagctctcattcaggagaagctaacagattctctagcgaccaaa

SEQ ID NO: 4441 - DNA, 366 bp, Lilium asiatic
gcggatcggaaggatgcggcggaggcgacgcttgctgcgtacaaggcggcgcaggatatccgccgtggcggagttggcaccgacgcatccgatccgtcttggtctggcgctgaacttctcggtgttttactacgagattctgaactcgccggacagggcttgtaaccttgcaaagcaggcttttgatgaagctattgccgagctggatacacttggagaggaatcttacaaggacagcactctcattatgcatctcctccgtgacaatctcaccttgtggacctcagacatgcaggatgatgttgacgagatcaaggaagcacccaaacgagatgatgagtagtagcaacttcaaacaagtccagc

SEQ ID NO: 4442 - DNA, 210 bp, Lilium asiatic
  modified_base (1)..(1): a, c, g, t, unknown, or other
  modified_base (12)..(12): a, c, g, t, unknown, or other
  modified_base (14)..(14): a, c, g, t, unknown, or other
  modified_base (22)..(22): a, c, g, t, unknown, or other
  modified_base (30)..(30): a, c, g, t, unknown, or other
  modified_base (158)..(158): a, c, g, t, unknown, or other
nagggacccggncnctcccaanactacggnttttgcctgcaccgtggggcagaagccgagcaaagctaaatattatttggatgacacaactgatgttgtaaatatgctgcaagccctcgcagaagtctccgcaaatggaacaactttgatactagagncagaagatgatacatcattctgagatgcatctttgattggtttctttcttta

SEQ ID NO: 4443 - DNA, 55 bp, Lilium asiatic
tcgtggacgcgtgggcggacgcgtgggtggacttttggggggaaaggtgaagcag

SEQ ID NO: 4444 - DNA, 120 bp, Lilium asiatic
tcggcttgggcacctctagagaggatgttagcgttcttaatatcaggttttaagtcttgaaatcaaaaaaaaaaaaaatattaaataaattaataaattaaaaaatgatttaatattaat

SEQ ID NO: 4445 - DNA, 310 bp, Lilium asiatic
gcaatggcggcttaagtttcccttcctttcttagatagggggcttgctcagtaaaggaaggcgagcgagagagacgatgccgaggaccggactttacggatcgatgtcctcccccaagatcgacgtcgccattgacatggggaaccctttcctcaaccgcaccgtcgacggattcctcaagatcggagccgtgggggcttccaaggtcgcagtggaggagatttaccacattctcgacaaaggaacaccttcaaaagacccagctcagaagtctttgaagaaaatgtgcatagaaggtgcactattgggg

SEQ ID NO: 4446 - DNA, 254 bp, Lilium asiatic
  modified_base (189)..(189): a, c, g, t, unknown, or other
catcccaactcgcttctgtggcgtctgctgctgctgcgctctcacaggggttgctgagatctgtggcgaatcccggtggactggcgccgtcgagatggcggagaaggtgaacccgatcgtctacatggacgtggctatcgagggctttcccgccgggaggaagatacttgagccggttgctgatgtcgncccgaagactgcggagaactttagggcgctctgtacaggagagaaagggattggatccacaactg

SEQ ID NO: 4447 - DNA, 98 bp, Lilium asiatic
  modified_base (2)..(2): a, c, g, t, unknown, or other
  modified_base (13)..(13): a, c, g, t, unknown, or other
  modified_base (45)..(45): a, c, g, t, unknown, or other
  modified_base (54)..(55): a, c, g, t, unknown, or other
  modified_base (58)..(58): a, c, g, t, unknown, or other
gncccaccaaaanggagcaaaaggggggagcaggacaaaaaaganaaaaaagannggnccggggggcacaaaagagaaggcggggacgcaaacggagg

SEQ ID NO: 4448 - DNA, 396 bp, Lilium asiatic
  modified_base (10)..(10): a, c, g, t, unknown, or other
  modified_base (188)..(188): a, c, g, t, unknown, or other
  modified_base (330)..(330): a, c, g, t, unknown, or other
cccacgcgtncgctcgaactctacacctaacccgtccaatggcccgcaccaagcagactgcccgcaagtccaccggaggcaaggctccccggaagcaactcgcaaccaaggcagcacgcaagtctgctccggccaccggcggcgtgaagaagccccaccgcttccgccccggcacggtggctctccgngagatccgcaagtaccagaagagcactgagctcctcatccgtaagctccccttccagcgccttgttcgggagatcgtccaagatttcaaggccgacctccgcttccagagatcggcggtgtcggcgctgcaggaggcgtcgnaggcctatctggttgggctgtttgaggacaccaacctgtgcgccattcacgccaagagggtgacta

SEQ ID NO: 4449 - DNA, 184 bp, Lilium asiatic
  modified_base (165)..(165): a, c, g, t, unknown, or other
ctggccaagagagcaggatcatccctgcatgctccgagcgagaaggaacctaggagttcggtctctcttggggatcatgggtgaacttgggatgcgcgtaatctgagagttgtaatagaattcaataagccttgagataactgtaataacttgtgagagagaggnagtgagattgagagggggg

SEQ ID NO: 4450 - DNA, 196 bp, Lilium asiatic
  modified_base (190)..(190): a, c, g, t, unknown, or other
cggacgcgtggggttgcagctggaaaggatctggctctttcagagatgtctgccatgggggaggagcagatccgtgctgtcaaggacacagcacccaagcagaaggggcctatcttgatacccgggctcaaagtggcggcccataaccgcggcagcaaaagagcctgcatgggaagggaggagagccagnaacggg

SEQ ID NO: 4451 - DNA, 289 bp, Lilium asiatic
  modified_base (260)..(260): a, c, g, t, unknown, or other
gcaatcctgcattatcaggtcagcaacggaccctcattgacaaaagccgcgaatggaagagacttgaagtaaccggtaaacaaaatggagatacattggaccagcttaagaatctgaatgctgagcaagagagggatgctgagcgtgttcgccagagggagaaactcttgccacaagatgcgtccatgtgaaaaaactcgccgctggctaaatacgacctgacgaaattgcggccttaggtagcacagaagaaggagaangaaacaaagaaaaagatgcaggaagctgc

SEQ ID NO: 4452 - DNA, 163 bp, Lilium asiatic
  modified_base (9)..(9): a, c, g, t, unknown, or other
  modified_base (31)..(31): a, c, g, t, unknown, or other
  modified_base (38)..(39): a, c, g, t, unknown, or other
  modified_base (48)..(49): a, c, g, t, unknown, or other
  modified_base (71)..(71): a, c, g, t, unknown, or other
  modified_base (81)..(81): a, c, g, t, unknown, or other
  modified_base (87)..(87): a, c, g, t, unknown, or other
  modified_base (110)..(110): a, c, g, t, unknown, or other
  modified_base (124)..(124): a, c, g, t, unknown, or other
  modified_base (128)..(128): a, c, g, t, unknown, or other
  modified_base (131)..(132): a, c, g, t, unknown, or other
  modified_base (137)..(137): a, c, g, t, unknown, or other
  modified_base (147)..(147): a, c, g, t, unknown, or other
cggacgcgnggggaaacagcaaagagcagcncaacagnngagaagaannacgagcggccggggggccaggncaacaccacnggagcngagcgccacagaagccccgaggnccccggccagcccncacncannggaanggaagcagcnggcaaccacgagacca

SEQ ID NO: 4453 - DNA, 305 bp, Lilium asiatic
  modified_base (252)..(252): a, c, g, t, unknown, or other
cccacgcgtccggttagaaccctagttttcgaaacagctgtgatggagaccgcatccaagggcaagaagggcgccggcggacgcaagggcggcacaaaggctaaatcggtgagtcgctctgtaaaggacggacttcagcttactgccgacaggatagggcgcgacctcaagaagggtcgctatgctcagactcctgctttaggagctactgtctacctcgttggcgaccttgagtatcttgctgatgaggancctgaatagtgggacaatgcggcgagggacaataagaaaaattgaattgtgcc

SEQ ID NO: 4454 - DNA, 318 bp, Lilium asiatic
  modified_base (234)..(234): a, c, g, t, unknown, or other
gcgaaaccctcgccgccgatctctgatctccgatggcccgtaccaagcaaaccgctcgcaagtgcaccggtggcaaggcccctcgcaagcagctcgccacaaaggctgcgaggaagtcggcgccaaccactggcggcgtgaagaagccgcaccgctaccgacccggcaccgtcgacctccgtgagatccgtaagtaccagaagaggacggaggtgctgatccgaaagctgccgntccagcgtctggagagggagaacaggcaggactgcaagacggatctccgcttccagagccatgccgagcaggcgctgaaggagg

SEQ ID NO: 4455 - DNA, 193 bp, Lilium asiatic
cggacgcgtgggattttgagcatgcaatggctacggatgtggttcttaaagaaacatggtcatactgtatattaatcgatgacctattctttttatcatgtttgtattgttgcggaattttgataattcagggataattatgtttgtaccctattgaaagtgagaatatcatggagttaataaaggggaaacc

SEQ ID NO: 4456 - DNA, 375 bp, Lilium asiatic
gcagaagcagtctccgtgggagcactgagcggagcatctaacgtgtcgaaggaggacccagtgactgggtcgggttttttgtctgatattttatccattgcaagggcagataagatatggaagcccaaagatggacgccctgtaatcctaatggggtctataccaaacaatggtctgtaattgtggcgactgtttttatttgtagtattacagtttgaatagtaggagaaactaattcatggttagcccatatggaaaagtacatagctccagtttgaagatatttttcagctggcctaggacttattttttattgttgcttctctgtattttttttcggaaatggttgtatcaatggagcagtgttctttgtag

SEQ ID NO: 4457 - DNA, 66 bp, Lilium asiatic
gactgacgagacagttgagagtgagagacattcagtgcatcctgatcctagccaagctgggagggc

SEQ ID NO: 4458 - DNA, 350 bp, Lilium asiatic
  modified_base (98)..(98): a, c, g, t, unknown, or other
  modified_base (100)..(100): a, c, g, t, unknown, or other
  modified_base (145)..(146): a, c, g, t, unknown, or other
  modified_base (229)..(229): a, c, g, t, unknown, or other
cggacgcgtttccgaccccttgtaaaaaaaaaaaaaaaaaaaaaaaaaaaaaaaaaaaaaagaaaaattaaaaaaaaaaaaaaaaaaaattaaaaatnanaaaatatacctttaaacacaaaaataaaaaaatattaaaaaaggnnacccccctttaatatcccaccttaaaatcccaattggcccccccctttttaacaacccaatttcccctaccctccctttcccngcccaactttttttttttttgccccctaaaaaaaattccccgcccccccttttaaacccccctaccaaaaaaacccctttttcccccccctttaaccccctaaaaaccaaaccccctttcc

SEQ ID NO: 4459 - DNA, 353 bp, Lilium asiatic
cgaagctgagcgactgctctgctgccagaacagactgctgccgagtcattatctgaagatgcaggagatattggtgcaagaaatattcaagggctcgctggtgaatcgatctgacgctcatcgtttatttaaggtggatccaagcaaggtggacagggtttacaagacgatcataaagaagttgggcatgcatgatggcttaattgatgcttgagttttaaatgttatttaatgagcccgtaaaagtatctttggagttgcaacgataaaacatgtaatattttctgagtatggagcatagattggtggatattttgaggttaaatcccgagatatttaatttcagtttgttg

SEQ ID NO: 4460 - DNA, 333 bp, Lilium asiatic
cccacgcgttcgaaaagaatcaccacttctttttctgaagatgtttataagatacatatcccgtgatgaatatatttgtgatcaggggatgattcatatgatggacggttatgattttctcttgctgcaaataaaggccgaggtgttgtggctctcttttgtttatcatcactacctttttattttcccgtgaatgtgaaaaaaacaaaaaggaaaaaaaatgtttatgtactcttgatacttattggaatacaaatgctctgtgtggtcaatattttttattgtttgaaaaatggttaatcacatttttttccttttaatatacaatatacc

SEQ ID NO: 4461 - DNA, 170 bp, Lilium asiatic
cccacgcatactcaaactctttttatttaatattataaaaacaaaaaacatacaaaaagaaaaagttaaaaaaaaaaaaaaacacacacctcaccaaaaactaataaaataaacatccccccccctacttaaatcctttcttcccttacctacccccccacttctccccc

SEQ ID NO: 4462 - DNA, 421 bp, Lilium asiatic
gatctctttgctgtttgccgaggatcggagcttctccgcgcccgtggtggaggttgctaggactgtaaaggacgtctccccgcacgatttcgtcaaggcgtactccgcccacctcaagcgatccggcaagatggagcttcctcactggacggatattgtaaagactgggaagttcaaggagcttgctccatatgaccctgactggtacttcattagagctgcttcaatggcgagaaagatctatctgaggcagggagttggagtgggtgcttttcagaagatatatgggggtcgcaagaggaatggaagtcgtccaccccatttctgcaagagcagtggggcaattgcccgcaacatcctgcagcagctggaggctatgaagataggttgactacatcttaaaggggaaggagaatcactt

SEQ ID NO: 4463 - DNA, 408 bp, Lilium asiatic
  modified_base (5)..(9): a, c, g, t, unknown, or other
  modified_base (38)..(38): a, c, g, t, unknown, or other
  modified_base (138)..(138): a, c, g, t, unknown, or other
  modified_base (332)..(333): a, c, g, t, unknown, or other
  modified_base (351)..(352): a, c, g, t, unknown, or other
  modified_base (376)..(376): a, c, g, t, unknown, or other
  modified_base (379)..(379): a, c, g, t, unknown, or other
  modified_base (392)..(393): a, c, g, t, unknown, or other
ggaannnnngggtcggagccacgccgtccgcacgtagntgtggagcccggtcttcgcccaatgacgttctcgttctggcttgtcgctttgcgccttacggggaggaggcgagcgatgcagagcgctctcgagagcctnttagctcgcgtcgatcttgcgttctttagggcatctgcctgtctgtagcgttcaaccctgtggaccctcttcgtggtccacaggtgggcgttcgcccattttggtaccgccttgatctgtgggggtggacccagggcagagcttatgggcggctgtaagcggtccctccttcctttgagcccttccgatcaggnntggtgaggaagccctganntatttcggtgcggtccaaatcacnttnggtgaagggagtnncaccaactgtacaag

SEQ ID NO: 4464 - DNA, 232 bp, Lilium asiatic
ctcaggagaaaggtgccagtgactggtttgaagacaccatttcgcgatggtctgttaaggcgtgttgctgaagacgtattacagttggcaaaggaaggcttggaaagaagaaggtacaaagaagttggatttttgaatgaagtgactgaagtggttaaaacaggggtgacgccggctgaaaagcttttgaagttgtaccatgagaagtggggatgcaatgttgatccaactt

SEQ ID NO: 4465 - DNA, 440 bp, Lilium asiatic
catctgcacgcgaggaaacatgctggtctaccaagatctgatctccaatgatgagctcctctgtgatggatttccctacactgagattgaaaatggtatgctgtgggaggtggaagggaagtgggttgtccaaggagccctcaatgtagatattggtgcaaatccctcagctgaaggtggtgaagatgatgaaggggttgatgaccaggccgtaaaggtggttgatattgttgacaccttccggcttcaggagcaacctgctttcgacaagaagcagtttatggcatacatgaagcggtatgtcaagcagttgacgcctaaacttgatgccgagcagcaggtgctatttaagaagcacattgagggggccattaagtttctgctttcgaagctcagtgatctgcaattttttgtgggtgagagcatgcaagatgacagta

SEQ ID NO: 4466 - DNA, 238 bp, Lilium asiatic
cgcaattcgctcgagagctcgaagtcgccgacggtcttcggtcgagtttgcggagttgactgaagtttctagacaacaatgtcaatgggtatgatgaagccgctgaaggctggttttgaggagcagcccgacgctcaccgcattcggattactctttcttctaagaatgtgaaaaacttgaaaaaggctggcctgatctcgtccggggggaaaaaaacaaggggtgaaaaggaaagga

SEQ ID NO: 4467 - DNA, 219 bp, Lilium asiatic
  modified_base (10)..(10): a, c, g, t, unknown, or other
cccacgcgtncgcggggaaggaagcgagggacctaaatgggcctaatcctaaaagaaccctgattggcttgaagccccctgttaccacctttttacttgaaggcaccttacccaacttaaacaaaatggccaagaaggccaaccgggaacttaaaatggttagcttaaggaacttcacacttttaaaaggcattttgaatccgtggtgaagcttaaagg

SEQ ID NO: 4468 - DNA, 124 bp, Lilium asiatic
accaactccgacaagagcccccttctgcgccgccccaatccgcgtcgtgagatggcgttgggccgatcattttcagtaaatgcagcttctgggatgggagttgctgatcattgcaggatatttc

SEQ ID NO: 4469 - DNA, 245 bp, Lilium asiatic
aaaaaaaataaataaaaaatctatattataatttctaaaaaaaaaaaacttaaaaaaagagagggggaaatttaataggaatccgtttttcagtttccacgctccctttctccttcccccgccgtcctttcttttatctattctatcctatctccctttctcactccttttctcttctacttcctgactagttcaacgttctccctccccatctccctacctgttcctcttttacaccttttccc

SEQ ID NO: 4470 - DNA, 381 bp, Lilium asiatic
ccggcatctcaggtggacacataaaccctgcagtgaccttcgggttgttcctggcgaggaaggtgtcactcacgagggctgtgttctatatggtgatgcagtgtcttggagccatatgtggagctggtgtggtgaaggggtatcagaaggccctctatgaggggaatggtggaggtgccaatgtcgtcaaccatggctataccaagggggatgggttgggagctgagattgtggggacctttgtgcttgtctacactgtcttctctgctactgatgccaagaggagtgcaagggactctcatgtccctattttggctcccctgcctattgggtttgcggtttttctggtacatctggcgaccatccccatcaccggcaccg

SEQ ID NO: 4471 - DNA, 409 bp, Lilium asiatic
  modified_base (384)..(384): a, c, g, t, unknown, or other
ccacgcgtacggaaggacccaagcacgcccacaagcacaagatagaggaggagatattggcgaccgcggccgtgtggggcggaggttatgctttccatgagaaacacgagaagaaggagttcaagaaggaggagaaggagagcgagggagggaagaagcaccatttcttcggttgaagatgttgatgtcatatatttataccccttgattgatatattatgatcatgggatggattattctgatttcctcctcgtgctcctaataaggatggatgattattgattagggtttgttttactggatctctacttgtttatgtgtgtgtcagtggagaaagaaaaacaaaaacaaaaaaatatgtaagggttgcaaatcatttcctnaaaaaaaaatggctttaataattaa

SEQ ID NO: 4472 - DNA, 376 bp, Lilium asiatic
aaaaaaaaaaaaaaaataaaacatataacaaatctcaaaaattaaaaacaaggatacttggtctgggtgtcatatcacattcttatacttcatccaacagtgattccaattcaatactatacacctaactttaaggcatgatctattcaattttatctctaattcaattggaaaacttgccaatatctgatttacatgacaattcacatctttctcacatctgcaacacaaacttgaaaaaaccttaaagctattctaaactattttctattgtacatatgaccataatatttactctttctctccctttattaacaccactatcgtggctatttttttaaataatatcataatacatcttgctatcttacttatc

SEQ ID NO: 4473 - DNA, 453 bp, Lilium asiatic
cccacgcgttcggcaagtccgcccctgccaccggcggcgtgaagaagccccatcgctggcgcggcggcactgtggctctccgtgagatccggaagtaccagaagagcactgagttgttgatccgcaagctccccttccagcgcctcgtccgtgagattgctcaggacttcaaggccgatctccgcttccagagctcagctgtggcggcgctgcaggaggcgtcggagtcctatctcgtggggctgtttgaggacaccaacctctgcgcgattcatgcaaagagggtgactatcatgccgaaggacatccagctggccaggaggatccgtggtgagagggcttgatcttggctctcacgtttagggcttcattttcactgggctttcaagatgtattggctttcatgtttagggtttcaaattcgcttcttgcgaaatgttggatttggatatt

SEQ ID NO: 4474 - DNA, 361 bp, Lilium asiatic
gaaggacccgagcacgcccacaagcacaagatagaggaggagatattggcgaccgcggccgggggggccggaggttatgctttccatgagaaacacgagaagaaggagttcaagaaggaggagaaggagagcgagggagggaagaagcaccatttcttcggttgaagatgttgatgtcatatatttataccccttgattgatatattatgatcatgggatggattattctgatttcctcctcgtgctcctaataaggatggatgattattgattagggtttgttttactggatctctacttgtttatgtgtgtgtcagtggagaaagaaaaacaaaaacaaaaaaaatatgtaacgtttgc

SEQ ID NO: 4475 - DNA, 394 bp, Lilium asiatic
cttgaattcccctctcaaactccatccaatggcccgcaccaagcagacggcgaggaagtccaccggcggcaaggccccaaggaagcagctggcaaccaaggcggcacgcaagtccgctccggccaccggcggagtgaagaagccccaccgattccgtcccggcacggtggcgctccgtgagatccggaagtaccagaagagcaccgagctgctaatccgcaagctccccttccagcgccttgtccgtgagatagctcaggacttcaaggctgacctccgcttccagagctcggcggtggcggcgctgcaggaggcgtcggagtcttacctcgttggactgtttgaggacaccaacctgtgtgccattcacgcgaagagggtgactatcatgccg

SEQ ID NO: 4476 - DNA, 218 bp, Lilium asiatic
cccacgcgtccggtgagatccgcaagtaccagaagagtactgagcttctcatccccaagcggtcctttcaaccccttttcccggaaaaaacttaagaccttaaaggccatcttccctttccaaacttcgccgtcttcgcccttcaagaagccttcgaatcttaccttgtggggcctgttgaagacaccaaccttttggccctttaccccaagaaggtc

SEQ ID NO: 4477 - DNA, 393 bp, Lilium asiatic
  modified_base (324)..(324): a, c, g, t, unknown, or other
aaaaaaaaaaaaaaaaaaaaaaaaaaaaattaaaaaaaaaaaaaaaaaaaaaaaaaaaaaatgaataatttaaaaaaaaaaaaaaacaaatacaaaaaatattaattgtccttccgttctaaaaaatccaatcttacttccccgttcatccaacttaataccttttttatactttaacctaaattaaattaacttcccctccttttacaaccttttatatttaaaaacccttcccttacccaacttaatcccctttcaaaacatcccctttttcccaacttgcctaaaatcaaaaaagcccctacccttccccctttccaaccntttcccaaccttaatttcaaattatacccccccttttacctccccttaaaccccgcctttttttttttt

SEQ ID NO: 4478 - DNA, 446 bp, Lilium asiatic
gcttatcaaaattcactctcccatgaggccggagttcaacagggtagtgaaatggttaccgagtcaaagtacacttcgtgcagcacgaattgcgtcagaaaaaatgttgaggaaatttggagggggaacggaggacgtgtggggtgcgtgctctatcgtcaagaaaagagaaagaggcaagacaccaaacaccagcggtctaggagaagctgctatcgagcatcaaaactatgtgaaaggagcaaccatgtatcctctggagcgcagtgttggaaatggtgtggtgtgtgtggtccctgactcctgaagcaatagttgtcgtgttgacaagcctaacataccaggatttcgactactgattacaacacagaagttggaggatagaaatcggtggatagacaatgaatttaaacatccaatgaatctgttaaagaggagagatgcac

SEQ ID NO: 4479 - DNA, 437 bp, Lilium asiatic
cggacgcttgggctgagtatcatggtgccatggagtcgccctttggttcgataccgggggcgggagccgcttctgcgaggagactcctacacatctgtcgacatcggcgcactccaaaagtactcattggtctcaatccatattcacattccaagagcccatcgcaactacctgagatgtatcaattcccgattattgctgacacagttgatactgacagatctcctgagttgaatattcagtgtatcattaacatttccaggtctgttacgcactctaacatttacatatcgatggagactacagagatcagctcttactgcctgagtcgaatgtttgctgaccacatcctttatttcatatggaatatatgtgtgactatccccacctattatattttcatgtttgagatgatccattttgaattgccttgaaat

SEQ ID NO: 4480 - DNA, 382 bp, Lilium asiatic
  modified_base (10)..(10): a, c, g, t, unknown, or other
cccacgcgtncgcctttattgtggaactcttatggtactattgcagcacttcttcaggagatggtcgcaatataccctgcacttgctcctccaacaatgtctcccgtggcatcaaatcgggtttgcaatgcacttgctcttcttcagtgtgtggcttcacatccagacacaaggattctttttctaaacgcacatatacctctgtatctgtacccttttttaaacactacaagcaagacaaggccatttgagtatctgagactcaccagcttgggagttattggtgcacttgtaaaggttgatgataccgaggttatcagttttcttctccaaactgaaataattcccctttgccttcgcaccatggagaatggtagtgaac

SEQ ID NO: 4481 - DNA, 420 bp, Lilium asiatic
gcaagaggtgggtggacttcttcaaccccgagtcccagtccgtggaatgggccactcggtgggctcgcactgctgaaaacttcgctaatgccaccggtgagcagggatacccgggaggcaagttcttcgacccattagggtttgcggggacgttgcagaacggggtttatgtgccggacaacgagaagctcgagaggctgaagttggccgacatcaaacatgctcgcttggctatggttgctatgcttatcttttactttgaggctggacaggggaagacaccccttggtgccctacgtttgtaatttatgggtctttgaagagctcgtaaacattctagatttaatgacgatggtaatctttgttgtaaagtatgtgttgaggtattacttcaatgtcgcaaatgaagtattggaatcc

SEQ ID NO: 4482 - DNA, 341 bp, Lilium asiatic
gtgatgcatggtcctccgacatctaaagaaatgtactctggtgcttaacgtggccctgcaaggggtggttgagggccaatcattaaatttggttccttataaaagccttgtataaaagcatatcgcgctgttatcttaacaaagctcgttctactttatggcagaaacagataccataggtttggttaatactggggggaagggaaccgctctcatacttctgaccatgctgggtggctgatctttttgttccaagtttgggaaatataaataaagggggggtaggtgccattagtgagtttgtattggtcattgaactgaccaaaatgacaactccgact

SEQ ID NO: 4483 - DNA, 122 bp, Lilium asiatic
aggcctttgaaaaaaatttttttgttaacccttttaaaacaagaaggcctttcctgcctttccttaaggttgtcttggcaagacaactacttgaaatccaattttttgtgcttttaaaggaa

SEQ ID NO: 4484 - DNA, 296 bp, Lilium asiatic
  modified_base (200)..(200): a, c, g, t, unknown, or other
cactagtgaatggggctcatgatacttcaaagcttgcggcattactggagatcttcatcaggaagtatgtgcaatgttatggatgtggaaatcctgagactgaggttattattaccaagtcccagatgattatcctcaaatgtgctgcgtgtgggtatctatcagatgtggacatgagggacacgttgacgacttttatnctaaaaaacccgccggagcaaaagaagggatccaaagataaaaaggcaattaggccttctaaaaaaaaaagcttaaaggaagggaaacttcttatt

SEQ ID NO: 4485 - DNA, 98 bp, Lilium asiatic
ctgtggtgaatttgataatgcgggtgccatgatgagtgttgatgaaactttgatgtgttggttccaaattttgaagcctgcagaaaagaaaacaaaga

SEQ ID NO: 4486 - DNA, 146 bp, Lilium asiatic
cacgcgtccgattaagactgttggtctataatataaaaaaaaaaaaataaaaaaaaagggtaggtattaataaaaaaataaaaaaattcatatatttatattatttaataaaactaataatagaattaaaattttgttttcttttt

SEQ ID NO: 4487 - DNA, 451 bp, Lilium asiatic
ctccacaaccaccttcaccctccaacaccggcaaaagcttcatcaaggtacatctatctactcgcttgtcccctttatgtcttatttggattgttatgtgtaggattttggaaaagcttggatttgtgtggcaaaatgaggaaatgatcaaagctcaagaaggaaaagagatgttgcaagcttgatgaggatgtgctctcggatctataagtacccctcctcccccattggattgaggtaagaggtctcactccggcccgagtgggggagggcacattgttggctgtctttctctcggttttggaggaggcacattgggagagcatctacaagtgatttcggagtggagagttcatcatggttcttgtttgtgggtctttggtgagctttgagagagtcatgtaagtggagtttgtaaggttgagtcttatttatgatgagtttttgttcg

SEQ ID NO: 4488 - DNA, 432 bp, Lilium asiatic
gctttcctcatccaagttcgaagttgaccttttagttttacccccttgttcagtaaggcctgtaattctcaatccctaaccctaatccaatctctgcaatttgatggggggagattcagtcgggcaaaggaccggctccaatccctcggttatcctcgctgaggcgctcagcaagaggaaccaactccaggaagagctcttcctcatcgagaagcaagtctatgatttggagactagctatttgcaagattccactcaccgtggaactgtattgaaggggtttgaaggatttctttcatcatccaagaatacaatcaacttgaagcgttccacgaagtttcagccagaagatagactgttctctctgtcttcagttacctcacctgctttttgaaaacatatggcgggacgtgatgatggaagggctgatta

SEQ ID NO: 4489 - DNA, 338 bp, Lilium asiatic
aagagatcgaagtctgaatctgagcccatggcagtggatacccacaatggggaaaaggggtgtgctgtataacagaatggaactggcaaaaagaagaagcacctcaaggaggatgatggcagtattcctatggatgttgaagtgaacaaatagaaaaagaagaaaacccattcacaagagtagcttttattgtcacaaatgcctttctttatcatcagcctcatattgtttacctactgttttatacgtctgtggactttaactggctttcaacttgcaattttgctaacttattttggttttttgtacaacggaaaagcatattctattagcttttt

SEQ ID NO: 4490 - DNA, 317 bp, Lilium asiatic
cgcgtccgctcaacaatcatctttaacctataacaacggttaaatctacatcaacattcatctatttacggtctaggcaacatatttcatattccaaactcaataaccaccatttaggaaaaactacctattctctaccaaaaccaaccattaatcaaatctcaagaatgaaaaccacatgttactatcattactatcatcaccaataccatctttttattccccctcctaccccattgaacttatgcaatatatctttcttctccccaactcccttacaactcactgtttgctgaacttacataccttttttcttt

SEQ ID NO: 4491 - DNA, 408 bp, Lilium asiatic
ctggtggcttataatgaaaatgaaagacctacccttgaaagacttcttgttcttgaaggggcggtatctgatttgccccctgtgggcaatcatgagactagggaagaaatggcatatggatgtgctgcaattactgattttcaacgctttatcaagctttctaaagatgaattatttggttcttgctatactggagataacctgaagtcccgcggaaaactatatgaccaccgggctatgactctgaatgatgatgactatgaaagggtctgccagatttcaaagagaaagggtgcttgttgttgggatttgcctgaaggtattgatgggccaaacaatggtggagaatttcatcgccatggtgagagggtgtacttaccatcttgggagaccttcgttcctgaggat

SEQ ID NO: 4492 - DNA, 187 bp, Lilium asiatic
aacaggacctgaaagaagcattattgaagtttttcctaatacttcgaacccaaacccaatgggggaaactacccattgtgggttttattaaaatttttaacaagaattttgacctttaagttcttccactttttaaacttccccttaaaatgttattaacaacaattccggttattccatttcaaat

SEQ ID NO: 4493 - DNA, 455 bp, Lilium asiatic
aggtaagagatccatagagaccattaatgtagtaaactgtatctgtcacatagggagaacagggcaacatcataatattgtccgtattccaatactacatctctactttttgttttgagaatttagatagcggagaatgagcgaactcaagcagctatcgtgcaagcaagggctgagttcgatgcgcttccaacatttgattccagaaacttctaccaggtcaacaacatgctggaggctccaccccactatcatcatcaggatcagacagcccttcatcttggctacgaagccaaagacgattcagttccatgaaagctaagagggtgtactggtcatattaattccacttaagcttgtgttgtaccttttgaaatgtttgtctgaaccctgtgtgattactaccattcctgatgtcattaggcatcttcatatgtcttgcttttagtaatata

SEQ ID NO: 4494 - DNA, 397 bp, Lilium asiatic
gccatcttgattcatatttgtcttttgggaggtcaataagagctatcattgaacacagagtggatctccataaccaaatatttcgacaaactattttaagaaaacaggaaaccaaggaaaactctgtaatctaatctcaaaccaaatgcaatcagatcatgcaggaagaacaacatgacctccagcaccctttatcttcttctgcggagtattctaaatcatattttccttgacaaccacagggcgcgaacaaagtcccattctctttcagagcaccttgaagtatccattctgccagacatggatgactcggggcgccggcaccagaggcgggctgaatcttgacggcgtcagggacgagggaccaaaagcgggcaacgttgacgatagggcactg

SEQ ID NO: 4495 - DNA, 443 bp, Lilium asiatic
attgtgtttgtgtgtatgtctgtggtgtttgagagtttgttctgaggtaacgtcatttgtgtgttgagagagagggttatggaagtgatcactgcttgacaagcagtgaaagttgtataagtctagatctgtgtaagctattactctgtggttaatgaatgattaatctgtttgtttttgcttaactattgagatttaatttgtgtttactaactatttagctttttgtgaaccgacggtagacaagaactgaacagcttgtgacaggaccatcatgctacttaaaatctagctctcggagtctgtatatattgactgatctgtgtcttggaactgctttgaacagtgatcttggaatttaactctttcttggaaaagtgctttctgtgtttggatttcccaagaagagaccttgaatactctctaattaatgtggtgaactt

SEQ ID NO: 4496 - DNA, 443 bp, Lilium asiatic
ctgtgaatagatacaacaatgtgcaacttgatggaaagcccatgaaaatagagatcgtctgggcaagcgtctcaacacccgctgttgtgcccatggttccaaatgttggctttgggaacccaaatgctggttttgggaacccaaatgctggctttggaaacccaaatggctttcagaggagtggcccagcacggggagattccataagagtgccacgaggtggtcgcggaaaggggaggggccatgggcgtggtatgggccgtggtgagcgtgatccggtatctgcctatgatcttgatgctgatctcgagaagtaccatcaggaatcgatgcagattaactgagttttcacctggatctctagtgtgttgctgttgcttgctcaatactggtacatgcttttatctatatctggaatcatgctactttaaggacacataaca

SEQ ID NO: 4497 - DNA, 451 bp, Lilium asiatic
gagtaatgcaaatgcatgagaagtggtggcacgacaagagcgggatgactctccaactgtatgggaccaagtttccagcaacctctctccagtgactgagcccagtgaccaaatccttcgcaagatccaatctctccagaactgaaagacgaataaacaatgtaaaggcatattccacctattcttcaagagatcctatccaagcgggagcaccacacgagaaaaattgaggggagtccatgtgaagtctataaatatcacggagttagaagctgataaagagggtgggcgtggcacagaggagcttcgcggtggcttatgcctggggattgctcctctgtgacccggttgacaacaacatatggtttccagtggcttcggccttttgctttagtgagtttatgtgtgaggagataatcagagagagagtctgtggagattatggagtaaa

SEQ ID NO: 4498 - DNA, 342 bp, Lilium asiatic
gagaagtacataattggatatggtgcatcgagcactgtgtacaaatgtgtgcttaaaaacggcaggccattggccatcaaaaggctctactctcattcgcaaagcctcaaggaatttgagactgaactggagaccgttgggagtatcaaacatcggaatcttgtttgccttcaagggttttcattgtccccttctggcaacctacttttctatgactatatggataacggcagtctctgggatcttctacatggcccttcaaagaagaaaaagcttgactgggatacccgaatcaaaattgctctatgagcttcacagggtctggcatatctacaccatgac

SEQ ID NO: 4499 - DNA, 437 bp, Lilium asiatic
cccacgcgtccgcattaatctcttgaagctctctgtttctttcatcttcgagatgtcttcctgctgtgggggaaagtgtggctgtgggtctgcctgcaagtgtggaagtggatgtggaggatgtggtatgtaccctgacatggttgaggggagcggcagctccaccaccatgatcatggggtttactctttccaaggagcagtttgaggggtttgaaatgtttgctgggactgagaatggagggtgtggctgcaagtgtggtgacaactgcaactgcaacccctgcaagtgcggcaagtgagctccccatggagaggaggatgaagggtctgatgccctctgttaaataataggccatgagtagttcacccatggtctctcgtgtcttgtggttgtgttggcttctgttgatcacttcaaataatgaagtgtttttt

SEQ ID NO: 4500 - DNA, 330 bp, Lilium asiatic
agttgttacaaccccagatgccattttgctgctcaaacatgtgtactggggtaccactggtatactcaggaccgttattaatattatgcttggatgtgaaaggttagtgtattggaatgtgaactcctacagtttgaaaatccattggaagtttgggtagaactgttttggtttgtaatgcataaaacgcttcgtgaccttaatgatttttgccaattaactgaatccgggaaactattttttccaattatataaattaggggggggtattataatttaaaacaaaataatttttagattttttataaaaaaaaaaaaaaaaaagggggg

SEQ ID NO: 4501 - DNA, 288 bp, Lilium asiatic
  modified_base (29)..(29): a, c, g, t, unknown, or other
accggccgaaaaccggtcgaccacgcgtncgccacgcgtcgccggcttcatcttgaagctggcacggactccacatcagcatcgaccgttgcgaccgggatggcaacggcatcggaatccccaacctggaggcgtggggcggcttgatgggagctgattacaactacttcgagaggggcaatctcgacatcttcagcggccggggaccctgcctgtctttgacgccatgctccatcaatgtaacctccgacggcaccggggcatcccatggttggtactgcaactaca

SEQ ID NO: 4502 - DNA, 440 bp, Lilium asiatic
ctgaagataaatttctttttgcatgctttaatcagctgtacaagatggaccctgatagatgggaagcttggtgcaatattctgaaacgtgttccaaacagtgcattatggctgctcaggtttcctgcagctggtgagatgagattgcgagcacatgctgctgcgcagggagtgagaccagatcagattatttttacagatgtcgccatgaagaatgagcacatcagacgcagtgctctagcagatctttgccttgacacgccgctatgtaatgctcacacaacaggcacagatgtattgtgggctggcgttcctatggttactctacccctagagaagatggccaccagagttgcaggatcattgtgtcgtgccacaggactgggagacgagatgattgtgaacagcttagcggaatatgaagagaaggctgtagctttg

SEQ ID NO: 4503 - DNA, 367 bp, Lilium asiatic
cgtcaatcccagcagccatgtcgtccaagcaaggtgggaaggcgaagcctctgaaggcggccggggtcgagaagaaggaatacgatgagaatgatctatctaatcttcagaagaagaaagaggaggaaaaggcactaaaggagttgaaagctaaggcagcacagaagggggccttaggaggctctggtctcaagaagagtggaaagaaatgagcacgataatggttattctatcatgtagtaactgaagtatctcctgacttcgttaactcaaatatgtgttgtggtgtttaaacattaaggtcctgcttatgccttgttattaaatgttgaaatcctgattggcgtgttatgaaatcactaaagta

SEQ ID NO: 4504 - DNA, 437 bp, Lilium asiatic
caatctctctctcctccgcccccaaatcccccaaaggaatctagagtgagaaaatgggcggggaaggcggcaagggactgatcgccggcaagaccacctccgccgccaaggacaaggacaagaagcgccccacctcccgctcctcccgcgctgggctccagtttccggtggggaggatccacaggcagttgaagtcgcggatcgcggctaacggccgcgtaggtgcgacggcggcggtgtactcggcggcgattctggagtatctgacggctgaggtgctggagctggcggggaacgcgagcaaggatctaaaggtgaagcgcataacgccaaggcatctgcagctggcgatccgtggtgatgaggagctggatacgctgatcaaggggactattgctgggggtggtgtgattccgcacatccataagtctttgatc

SEQ ID NO: 4505 - DNA, 283 bp, Lilium asiatic
aatacacatgaaaaatggctccctaccttccccttgtatgacacggaatacatatataacctggttctgacgacaacccggactagttaattcaggaccgaaatttccaccgccggcgatatctttgctccgtcgccggtggccgccttataggctccaatctatccgatgttagcccctacgtcctttctcctctataggtggacataagaggaatagactggcttccccaccacactccttagattcgcacaacattgcctttacccaacttacatgactt

SEQ ID NO: 4506 - DNA, 443 bp, Lilium asiatic
ggatctcctactgatgattccggtggagaggaatctgatgctagtgatagtggagctgaaagggaagggcctgcaaaaaaagaacccaagaaagaagctgctcctacgaaggcgtcatcatccaagaagagatccaaggatggagatgatgaaagttcaaagaagaaaaggcccaagaagaaaaaagatcctaatgcaccaaagcgggccatgtctggtttcatgtttttctctaattctgaaagagagaatctgaagaaagaaaaccctggaattgcatttactgatgttgcaagagcacttggggaacgctggaagaagatgtcagctgaggagaaagagccctttgagtcaatggctctgactgatcaggtacgttacaaggaagccatggctggttataagagtggagctgctcctgtaaatgcagagtcggacaatgc

SEQ ID NO: 4507 - DNA, 271 bp, Lilium asiatic
atatcaacagctgccgatctttaggatccattcttactttcgcagccatccaacgaccttggggtgggtatgcaacaactaagtatattgcatctgaacggcattttacaactgacgaaaatgagaaaaacgtctagtcacccaacttaatggacaagatcaacatcctcctgtcctctactgtcgtagtagcctaaaggacttcaccgatcgtacttctctacagttgatcagcctgtatgatcaatatgacgcaccctgaatcggcaca

SEQ ID NO: 4508 - DNA, 447 bp, Lilium asiatic
gtgcataatcgaggaggaaacacatcatctccacgaaatgttgggaccgccttccatcatagggggcgctccagatctacatctgcagagagaaggcatgattctaacgacaaagatgttaaaagttctgaaaagcctaggtataagcactccacatctagatctgctgaaggaaagcttaaccatgatgataatgatgtgaagaaatctgaaaagccaagacataggcactccagatctatatctgctgaaggaaggcttaaccatgatgataaagaagtgaagaaatctgaaaagacaagacataggcactccacatctcgttctgctgaaggaaggcacatccctgatgatgttgtgaacaaatctgagaggccaaagcatatgcactcccgatccagatctgctgaaggaaagtataaccatgatgataaagatgcgagaaaa

SEQ ID NO: 4509 - DNA, 166 bp, Lilium asiatic
  modified_base (94)..(94): a, c, g, t, unknown, or other
  modified_base (96)..(96): a, c, g, t, unknown, or other
gtgaaggctgggaggtacatggaaaatgtgaaggtggggaggaagaagaagaatttgatggtcgggccaagggaaggaagtttgagaaggccanangaaggaggaagagcaagggatacaaggtctaagtcaagtttgttctacttgaccagggaatttgagaact

SEQ ID NO: 4510 - DNA, 321 bp, Lilium asiatic
  modified_base (279)..(279): a, c, g, t, unknown, or other
cggacgcgtgggcggacgcgtgggttttgtgtcacactcacaatatatgcaatcaaaagcgaaccaatgcatgtcattcttgctcagtcccgaaacaatgtattttggccgccgggggaaaacaaggcctaaatgtaggtttatgatgaatgaagaaatgtattgattaatatcattggggtgactaactttagggaattaccggaatatatctgtaaccaagagtaaatatttagtaaggagggaaggatgattaatgaggtgtttgtgaatttactntcctttttatgctgtttatgataaaaaaaaaaaggggggcgg

SEQ ID NO: 4511 - DNA, 137 bp, Lilium asiatic
  modified_base (1)..(2): a, c, g, t, unknown, or other
  modified_base (118)..(118): a, c, g, t, unknown, or other
nnaaaaaaaaaataaatataaataaaataattttataaaaaaaaaaaaaaaaaaattttattgttttattttaaaaaaaaaaaataacaaaaacaattcctttttattttattcattngggccttcctttttaaaaa

SEQ ID NO: 4512 - DNA, 446 bp, Lilium asiatic
caacaactccacaaccaccttcaccctccaacaccggaaaaagcttcatcaaggtacatctggctactctcttgtcccctttatgtcttatttggattgttatgtgtaggattttggaaaagcttggatttgtgtggcaaaatgaggaaaggatcaaagatcaagaaggaaaagagatgttgcaagcttgatgaggatgtgctctcggatctataagtacccctcctcccccattggattgaggtaagaggtctcactccggcccgagtgggggagggcacattattggccgtctttctctcgattttggaggaggcacatcttgagaggtcttcaaagagttcttgagagtccgggatggttattctttgtcatggtacttggtggagtcatgtaagtgagtcatgaggttgttttccttacaattttcttgagttttggttcgg

SEQ ID NO: 4513 - DNA, 343 bp, Lilium asiatic
  modified_base (25)..(25): a, c, g, t, unknown, or other
acgccacgcgttctcttacaacatnccacctccatataaaggcgcctatcatctcttcgtcctctaggtctactttacttcccacatgggcccaaaatacaacaacaacaactgcttctttgtcaatgaatgctccaggatgatgcctaaaccatacttcataatccattccttttctccaaattattcaaaccttacatcctggccacggagctgtaccaaaactaatctcgatcatacacaagttctttgtgcgatagacttaaactcttcttctaccgcttaaacaatatccttcttttccctacattgatcttataattgaccatcatttctcaaatct

SEQ ID NO: 4514 - DNA, 455 bp, Lilium asiatic
cccacgcgtccggtggccggtgacatgggcaaccatgttactgacatggatctctggttcatggttgatcattgagaggaataatttgaagaaaattaaaatgcagacatggaccataccgagatttagtttccaatatcgcttaacttggcagagagaggcaatcaatgacttaattgaaaagtctattctagaagctgaagaaaaaggagttaaagttcttagtttagggctccttaatcaggcaaaagagcttaatggaggtggtgaactttatattcaaaagtatccaaaattgaaggtaaaaattgtcgatgggagtagcttagtgactgctttggttctaaatagtatccctcatggaacaaaacacgttcttcttcgaggaaatccttcaaaggttgcttgcgcactagcccagacattatgcaaaaggggagtccaggtcacaatga

SEQ ID NO: 4515 - DNA, 450 bp, Lilium asiatic
cggacgcgtgggttctgaatggcagccatcgataaagaattggcacatcaaagattatgggacatcggggttacatctattttgtgatcctagccagaaaatgacacaaataaagtttgctagttttggaactccacaaggagtgtgcggaaacttctcacaaggcagctgtcatgctcgtcgatcttatgatattttcgaaaagaaatgtatagggcaacaatcctgttctgttgcggtagtacctgatgttttcggaggcgatccatgtcctggaaccatgaaatcagtctctgtcgaggcaatatgtgaataatagtcagaaatctcattcgattaaccattgaagacgatcgcatacacccattgctacatacatctgcatagagtttcaagcatccatgatgaagttgcagaagttgcgatacacctatcgagactgacccttta

SEQ ID NO: 4516 - DNA, 160 bp, Lilium asiatic
gctatgggctacttacatgcagatggcaaaccaacgttgctcagctcagtaagactctccgggcctgggataccaagatcatcctctcctcaaaaacatacatgcctagatttttgatctgtctaccccgactatcatcttatcatattatgctctatgc

SEQ ID NO: 4517 - DNA, 175 bp, Lilium asiatic
  modified_base (6)..(6): a, c, g, t, unknown, or other
  modified_base (8)..(8): a, c, g, t, unknown, or other
  modified_base (12)..(12): a, c, g, t, unknown, or other
  modified_base (14)..(14): a, c, g, t, unknown, or other
ccgacncntcgncntacaccattcctaccttcaattttttccaaccacaaattccattttgcttcttataaattaatacttgtttaccactcgtttatttacaacctttttaattataatactttaatgtaaaccattattattttcttatttaaacttctcctttttaaaaatc

SEQ ID NO: 4518 - DNA, 442 bp, Lilium asiatic
  modified_base (412)..(412): a, c, g, t, unknown, or other
gatgatttggagtgggacatcatcgaatcgacgagggcactgacgagaaccgggccgacgggtgcttacaagccaaaaaagttttcctttgacgaggaacttaaggcgttgcaagagagggtcaacatctacaactacgaatacaagaagatacccaggctgaatgaaaacaattcagagaaaaaatagactagtcaatgtcggggacgctatgctgtggatgaatgcagattttgaaagaaatttggttgctatggctcgcctgcaagaagaacccaggatgctattttcctctacttttgcctttacaaagagaatgaggaaatttgcctaggcactttgtttttgtcaggaaagagagtagcaaaagtatagcttgttaaaccatgtgaacgtaccagataaatattangagttctgtgtgatattatgatctcttttc

SEQ ID NO: 4519 - DNA, 161 bp, Lilium asiatic
  modified_base (110)..(112): a, c, g, t, unknown, or other
  modified_base (114)..(114): a, c, g, t, unknown, or other
ttttggtcccttgttattaaatactgcattatattttcttaaacaatataatgcaggctgggttagtatagcacaggggaaaaaaaaaaaaaaaaaaaaaaaaaaaaaannnanaaaaaaaaataaataaataaaaaattcaatctttggggggggggggg

SEQ ID NO: 4520 - DNA, 224 bp, Lilium asiatic
cggagatggagggctctgatgatgtgaaggtacgaggagcagaggatcaagcagaggagaggcacatgcagacggaccggatcgagaaccaggagatcaagcaccgatgattgatggctctgatgaagtgaagttctgatcagacggcgaagagggaggccgtgcatgaagactctagaagcttgtgtgagaggagatcaccattggttgtgcatgcatggtgc

SEQ ID NO: 4521 - DNA, 341 bp, Lilium asiatic
cccacgcgtccgagggagaggacttccccgcgcagaactatatcgttaaggaaggcaaactggcgagccagtacctctgatgctacagccatctcggttgcagtttctggtatggatctgcacttctcagtagctaaaagtaataaagactttgagaagtgtgtattgtttttcctaagttggttttagcttctgtttgaaggcatcgaactctgtgaactttagggtcaataaattcaatgcctgcggatgttttaaattttgtattgtgatgttaagaacgaatgctgaataagtatttggtaattcctgaaatgaacagtttctttaagttgactgtt

SEQ ID NO: 4522 - DNA, 430 bp, Lilium asiatic
  modified_base (371)..(371): a, c, g, t, unknown, or other
cccacgcgtccggtagatgcagaagatttggaggattgtgagagtattgatgaagataatggtcttttatatgctagtgattctggggacgagaagtctgatgatgaaaatcacgttgaaaacgttgataacgatggatctgaaaaagtcaaagcactttgtagcgagtcagacaatgacggccatgatgatgaaaaggaaatagtcaagtccgtaacaggaaagaggaagtttgtggattatgatgtccagttgaatgctgcagacacaagccttcgtgctttgaagagacttgcaggagccaaaattgctcaagtttcgacggaagaaactgatgggattctttcgaatgaagatttccaacgcattanggtgttgaaggcaaaggaagaagcaaagctgactttggctcgacatggtctaatgaaaa

SEQ ID NO: 4523 - DNA, 453 bp, Lilium asiatic
cttccagatagtgatataagaggttttatactttcatgatttagttcagatatacaaggagcgtatgagacctttatgtatatatcaagaagataatactgggtcctttattttcctcttgctctatatttatgatatgctcattaattcctggagtatgatggagattgataagctaaagtcaaatctcaatcataagtttgatatgaaggatcttggttcagtaaataagatacttgtcatatagattgtgagagataaaaagtatgataagttaactttttcataataagagtacttggagaagcttgtatgtcagtatgacatagatatggctaagctggtaagcattcagttacatgtatactttgggatcttaagaaagatatatctaaccactatcgaggaaagataatatatatatatatatatatatatatatatatatatata

SEQ ID NO: 4524 - DNA, 172 bp, Lilium asiatic
  modified_base (63)..(63): a, c, g, t, unknown, or other
ccacgcgtccgcccacgcattcattagattcaaaacttttgttttatagctaaaatattcatnaagagaaatgtcttttttatgctctttacttgtacaacaaaaagtctgctgattaaaatcatttttataactttcttatctactcatctaaaaaagacaaatcactttg

SEQ ID NO: 4525 - DNA, 177 bp, Lilium asiatic
ccccaattccgcgccttgcttcgcggggcggaatggaaaaaattaaccggcttattttccaagaaacccaaagccttcttaaaatttttcttgaaaatggcattccccatgccctgacctacacttaacaccccccgcgaaagaccgtgaccgccaatgatgtggtgtatgctctta

SEQ ID NO: 4526 - DNA, 415 bp, Lilium asiatic
cgacccacgcgggcgcctccgcgtccgcccacgcgtccgagacggtctcgtatctattcacctcgacaaaatgacagggatggggattcatggggtagacgagggagatcccgttctcgttctccatatggtaggagaagagatgatcctgacttacataggaggcacagagagcgctccttgtctggtgatggcagtggtcatcgtataagagagaaatttcattctccatatcgacggagaagcgataaatatgactttatattgggagggcgcgctcagagccagagggcactcccttgtgtgggatcattatgaatgtcacccttttatctcatctatctgaatgtttattatatttatgatgtgccctaaactttgctttggtttttcaattatattcgagtgatttaaa

SEQ ID NO: 4527 - DNA, 383 bp, Lilium asiatic
  modified_base (118)..(118): a, c, g, t, unknown, or other
  modified_base (339)..(339): a, c, g, t, unknown, or other
gacatatcaagaattactattgaattcagagaaacaatgttggctattgaggaaagtgagggatattattacactttgagtcttggtcaatctgatgcatttcatggttctacggaanaagatcctgtaactgaactgacagaataaatgttgtcttcgaagatcccatgccagtctaagaggagacttgctgagtgcatatcggatgccgatgatgaagagtgtacagccttagaatgtattactagggttaatagcttattaagcctatcgaggtttctatctaggcataaaagatcaactaattctagaagaaaaaggttattataactgacacanatatcatttagcaaaataaaccatgttttggaatatacttacat

SEQ ID NO: 4528 - DNA, 330 bp, Lilium asiatic
accatcctacactccctttttttatttttattaatacctaaaacctatcgaaggtgtatcctattttaaactatctaacaaatcatataatataaaattaataatatcccactatcactattattcaataaatatttatttattcttcctcactaaaaataacatattactatattcttatataaatatatgatcctttactttatattttattattaaaatcactttttcccatctatatttaattatcaatttctttctccttttcactttactttttaataactacttttattctttacttatacaataaatattctcttttttatt

SEQ ID NO: 4529 - DNA, 396 bp, Lilium asiatic
  modified_base (27)..(28): a, c, g, t, unknown, or other
  modified_base (31)..(31): a, c, g, t, unknown, or other
cggggggggccacgcgtacggtttttnnaantttttatttaaattatattttctttttgtttgaatgctacaaatttgtcgtgttcctatggcattaaaatcctccctcctctacctgctccactgtaccttgtttgctttggaaaaatttacctattgttgacttcattttcttttgtttccatggggaatggtgttaacttaacaaatggtctttatagtctttctttattgactgctccattatcctttattgtaatgtcaatttcagtgcttccattattccctgagcttgctatatttgtatcatcaattactgttgcctcctttgtttttcttttttacaaccaatacaaaacatctgtttttattgttgatactgcaatcctttccctt

SEQ ID NO: 4530 - DNA, 281 bp, Lilium asiatic
aaaaaaaaaaaattaaatatttaaaaaaaaaaaaaaaccccctccttatttaataaaataaaacccctctcccttataataaaaaaattattttttttattctaaaaacctctttattttaaaaaaaaaaaatcttatactccttataaaaaaaaaaaaaaatggcctctttaaatcaaaaaatctcactcctctctttacacccctctaaaaaaaatcttcttactttttttaaaaataaaaaaaaaacctctcttttcttctttaaaaaaatatttatt

SEQ ID NO: 4531 - DNA, 320 bp, Lilium asiatic
  modified_base (38)..(38): a, c, g, t, unknown, or other
ggttgaatgctacaaattggtcagcttcctatttcatnaaaatactccttcctctaccttctccactgttccttttttgctttttaaaaaattacctattgttgacttcattttcttttgtttccatcgagaatgatcttaacttaacatatattctttatcatctttctgtagggactccttcattatcctctattgtaatattaatatcagtgctttcactattccctccacttcttatattttaatcatcaatatcttgtgtcctcccattgttttttctttttttctcaaccccatacaataacatcttgtttttt

SEQ ID NO: 4532 - DNA, 387 bp, Lilium asiatic
  modified_base (73)..(73): a, c, g, t, unknown, or other
aaaaaaaaaaaataatttataataatatttattaaataaaattttttaaaagaaaaaataaaaaaaaaatatntaataaataatttaaaaaaaaaaaaaatattttatatttaaaatataatataaaaaaaaaatattttaaaaatatattatattaaaatttatttttataaaaaaatatataaaaatattaaaaaaaaattatattgtaaaaaaatataaaaaaaatattttattaaaaaaataaattttttatatattaatttaaaaaaaaaaaaaaatattttttaaaaaaaaaattattatttttaaaaaaaaaatataaaaataatattaatttttttattaaaagaataaaaaataaattttaaatttattatatatata

SEQ ID NO: 4533 - DNA, 394 bp, Lilium asiatic
  modified_base (385)..(385): a, c, g, t, unknown, or other
gacttacaaagccaagcttgttgtcttcccaaggcgatcacagaagtcaaaggctggggattctacacctgaggagctggccagtgccactcagctccagggcacttacatgcccattgtccgtgagcaaccgtctgttgaagtggtgaaggtgactgaagagatgaaggcattcaaggcctatggcaagctaagggttgagaggatgaaccagaaacagattggggctaggatgaagaaggctgcagaggctgagaaggaagagaagaagtaacctgttcgttgctttaatttgtggtgatttgtccaagtaaaaccccctcaggagtaattttggttcttgtggtctttctgtcgtacctttctattataatactatgaattntgaggatgc

SEQ ID NO: 4534 - DNA, 434 bp, Lilium asiatic
aggcgttcagcctgttcgataaggacggcgatggttgcatcacaaccaaagagcttgggaccgtgatgcgctccctgggccagaacccaacagaggcagagctccaggacatgatcaacgaggtagacgctgacggcaatgggaccatcgatttcccagaatttctgaacctgatggcccgcaaaatgaaagacaccgactcagaggaggagctcaaggaggccttcagagtgtttgacaaggaccagaatggcttcatctctgctgctgagctccgccatgttatgaccaaccttggcgagaaactgacagatgaggaggttgatgagatgatccgtgaggctgacgtcgatggcgatggccacatcaactacgaggagtttgtcaaagtcatgatggccaaagtaaaatttgactggttggatactagtatg

SEQ ID NO: 4535 - DNA, 235 bp, Lilium asiatic
  modified_base (41)..(41): a, c, g, t, unknown, or other
cgggggagagcaatcatgcagacgcgatgtcacaataacanagcgtgaggcacatataaaggaaaatgatgcagcggagcatcgtgatctgagcactgagaatggtggtgcagaaacagttgaatctgaaaccaaagaagttgagataaaggattttcctgctgttgagagtgccaaagaatgagagcatcatgtgtgagagcatgacatgaagaaaggcctgagtttgctaaat

SEQ ID NO: 4536 - DNA, 440 bp, Lilium asiatic
aatgaatttcactactgacaaggtgaggtctttggtccgtaagtggcaaactctcattgaggctcatgtggatgtgaagactacagataactacactctccgcatgttctgtattggattcaccaagagacgtcctaatcaagttaagcggacttgctatgcgcagtccagccaaattagacaaattcgccgcaagatgactgagatcatgataaaccaggcgacttcttgtgatctgaaggagttggttcaaaagttcattcctgaaatgatcggaaaagagattgagaagcagacccatggcatttatcctctgcagaatgtcttcatcaggaaagtcaaaattctgaaaggccccttaagtttgatcttggaaagctgatggagggttcatgatcacactggtgaggatttgggtgtgaagatggataggcctgctg

SEQ ID NO: 4537 - DNA, 232 bp, Lilium asiatic
  modified_base (23)..(23): a, c, g, t, unknown, or other
agacggctgagaactacactctncccatgttttgacttcgattcaacaagagacaccctaatcaaactaaacggacttgctatgcacaacacatccaaatcagacaaattcgccaaaagaaaactgacatcatgaaaaaccattccacatcttttgaccacaaggaagtggaataaaacttcccttgtaaaaaagaaggaaactcgatcgtgaattaaacccctggcattta

SEQ ID NO: 4538 - DNA, 244 bp, Lilium asiatic
ggaaaaggatggcgatctcgacctgctccgtcgcagcgatggcgcttggctgcaatctcagccgcccgtcctccctcgccccgtcccagctctccgcctcgagatcgctgtggtgcccgccgctccggcgtgctccggcgagggcccggaggctctccgcggttcctcagaaaccgattacgccgcgggttgaagcaaagaagcagacattttcttcgcttgatgaactttctggaaaatctga

SEQ ID NO: 4539 - DNA, 323 bp, Lilium asiatic
  modified_base (187)..(187): a, c, g, t, unknown, or other
ggttgtttctctgattgctgccatcgtgttattggttctcactgcggtccagaccatctttaccgtaatttgattccccttcttccctccgaagctatttctaaggtttctttattcgtttgaggcgacatatttgtagtttgggatttaaggtaagctagtaagagttgtgtagaagctgtggatngattgtgatgcaattcaaaggaaagaacgccgtgttggaatctatttttatgataaagaatgcccgaatataattgtgggaaggtaactagaattgggggttttttggtattgggaaaaactatgctgtgtttccc

SEQ ID NO: 4540 - DNA, 448 bp, Lilium asiatic
caccctggaggttgagagctctgacactattgtcaatgtgaaggcaaagatccaagataaggaaggcattcccccagaccagcagcgactcatctttgctggcaagcagcttgaagatggcaggactcttgctgactacaacattcagaaagagtcgactcttcatctggtccttaggctgaggggtgggatgcaaatctttgtcaagaccctgactgggaagactattactctggaagttgagagctcggatacgattgataatgtgaaggcgaagatacaggataaggaggggattcctccggaccagcagagactcatttttgctggcaagcaaactggagaatgccgcaccttggccgattataacattcagaaggaatccacgctgcatctggtcctgcgtcttcgcggtgggctgtgagttggtttcgtccttcgttctgtg

SEQ ID NO: 4541 - DNA, 387 bp, Lilium asiatic
cagaccaaattagggtttcgtcaatcctctgttatgggagtcttcaccttcgtctggcggagctccggcgatgagtggaccgccaagcccctttccggcgacatcgaggcgtcggctgcgtccacgtacgatctgcagcgcaagctcgtccaggccgccctctccaaggactcctccggcggcgtctcttcctccttttccctcgtcactccctcctccgccgttttccaggtgatcattggtggcggtggtggtggtggaggatttgttggaggcggtggcgcatctgctggtggtgctgcagccggttcagctggtggagctgcagttgctgaggcacctgctgtggaagaaaagaagggagaggaaagaagagagtgatgatga

SEQ ID NO: 4542 - DNA, 441 bp, Lilium asiatic
  modified_base (368)..(368): a, c, g, t, unknown, or other
cgttcatgaggtcttttctgcagttctcttgttaacctatttataggctaaaatttaatgagaatagacaatgaattcgaaacattcaatatgagtgtttgagtatttaggtttctcggtagggagggagaacaccctgctgaaaccaatcattagggcaaacacctgattggtacttcagatttttttggcagggagggataacaccttattgaaaccgatcaggagggcgaacacgtgattggtaccccatcattttgttttgtgtttcagttataattacctttttcttgatgcattttcctttttttatgtatgaatataaaaaaaaaaagaattatgtttatcataatgaattaagtatcggntatgcactcctctcttttatactgaattaattagatatcatttttagtcgatatgaattgtatttgtgatgca

SEQ ID NO: 4543 - DNA, 233 bp, Lilium asiatic
atgcgagggaaggatttttcagcttatgagacatcgtaatccatcgaaccacaaggtttcgatgggacgatgtaattaccaagctgcgggttggagagataatatacgtagacgaagctgtaagtgattgtttatcaagaaaatgactgagtaaaagaataattttgcagcatatgtataagtttttccgattaaatgttcattaatattgaatgaaggtatgatattgccgt

SEQ ID NO: 4544 - DNA, 336 bp, Lilium asiatic
cagatattgatgatgtcttaaagagtctggttgattggctctgttcccagttgaagaacccgtctcatcccagccgagctatcccaacagctataaattctctcgccaccttgctaagggaatctcgtgttagatctttgtttgtcactgcagatggcgtgaaattgcttgttcctttgatttcacctgcatcaactcagcagtctatccagcttctttatgaaacctgtctttgtgtttggctcttgtcatactttgatgcagcagtggactatctggccaccactagggtgcttccaaggctaatggatgtcataaaaggttctactaaagaaa

SEQ ID NO: 4545 - DNA, 416 bp, Lilium asiatic
  modified_base (378)..(378): a, c, g, t, unknown, or other
cccacgcgtccgtgattatgctgtttaggctgctcatgttgagcttgctgaacgaatgcgaaaaagggatgctgctactgctccaaatgttggagatcgtgttccgtatgtaataattaaagctgcaaaaggcgctaaggcttatgagaaatcagaggatcctatatatgttctggagaataacattccaatagatgcccaatattatctcgagaaccaaataagcaagccacttttgagaatatttgagcctatcatgaaggatgcaagcacagagctcctccatggtagtcacactagatctttatctatttcaactccatcaaacagtggtataatgaagtttgcaaagaaacaactgacgtgccttggatgcanagcactaatcggtaatacaggtcaaacactgtgctcac

SEQ ID NO: 4546 - DNA, 364 bp, Lilium asiatic
aaatttgactggttgattactagttttatgttattctcctttctctattacctgggggtagatctggaattagatgtagttgtgaaatcagaaaagaggatgatagtatcatgtaaaaaaaaaaaaaaaaaaaaaaaaaaaaaaaaaaaaaaaaaaaaaaaaaaaaaaaaaaaaaaaaaaaaaaaaaaaaaaaaaaaaaaaaaaaaaaaaaaaaaaaaaaaaaaaaaaaaaaaataaaaggggggggcccttttaaaggatcaaattttttttcccgggggttgaaaaaatttatttttttttttgtggcacaaaaataaaattaaatggccggtttttaaaaaccgggggttttgggaaaacc

SEQ ID NO: 4547 - DNA, 423 bp, Lilium asiatic
  modified_base (417)..(417): a, c, g, t, unknown, or other
gtcgacagagatctaactcttatcattgaccttgggttgaagctcatctatgctatgaatgctcatgtccatgctgaccatgtcactggaacaggaattattaagactaaaattccagatgtgaagtccctcatttccaaagctggcaatgcgaaagccgacaagttggttgaacatggtgataaaatatgttttggcaatctttttctggaggtgcgttctacacctggtcatactttgggttgtgttacctatgtaacaggaggtgggccctgatccagcctaatccaagaatggctttcactggtgatgctttactgattcgtggctgcggaaggactgattttcagggtggaagttcacatcagctctaccaatctgtgcattcacagatattttcattaccaaaggatactntgatat

SEQ ID NO: 4548 - DNA, 438 bp, Lilium asiatic
  modified_base (2)..(2): a, c, g, t, unknown, or other
cnacgcgtccgggctttcaaggctcttcttatgttgggtcttcttggggcgacggctctcttcgtctcctcggacgctggtcgggagttagcgaaggaaacaaaggaaaacactgaaaagaaggcaacggagactggagttgccgaccagaagtatggcggatatggcccaggcggcggcggctaccacaatggcggcggttatccgggaggaggctataacggaggaggctaccacaacggcgggggttaccccggtggtggtggtggctatcacaatggtggtggaggtcgctgctacaatggttgttgccgccgcggatactatggtggttgccagtgttgcgcgcatccagatgagatccccgatccggaataccgtcctgaatcgatgtatggacattagatggggataaccaggactccaaggggaatgttt

SEQ ID NO: 4549 - DNA, 441 bp, Lilium asiatic
gaatatggtcttcaaaatttcctgcaaaattatgttttatctcctgggaggtatgcacataggcagtcttgacatagtccagaatcagaagatctaatcctctgtgaacaagctgcagaagactcggaacaccttttcctaatgtgcgatttctctgataacatttggaaacgatttgaaacttgtttctctctccgaagccgaaggctcactactgtcaacagatggaagaatagatggagtgcacgattggagtctgctatagcaatttgggtctggaataagatccactgtactattttatggaaattctgtgaggagagaaaccacaaaacctttgaggagagaatgggaagaggtcttcaaggaaatattggtggcaatccggagctgggggtgtcaacagggaattcttacctctatttctctttcaaattggat

SEQ ID NO: 4550 - DNA, 442 bp, Lilium asiatic
  modified_base (16)..(16): a, c, g, t, unknown, or other
gcgtccgccacgcgtncgtccaaagctcgaatctctcatcaatcatgtcaggccgaggaaagggagggaaggggctcggcaagggcggcgccaagcgccatcgcaaggtgctgcgggacaacatccagggcatcaccaagccggcaatccgccgcctggctcgccggggcggagtgaagaggatcagcggcctcatctacgaggagaccaggggtgtgctgaagatctttctggagaacgtcatccgtgatgccgtcacctacaccgagcacgcgcggcgcaagacggtgacggcgatggatgtggtgtatgcttctaaagcgccagggccgcaccctctatggcttttgggcgtgatgtagactgttctctcttgcgtctctgtttgttaatttcgcttggatggaattctgtcttatattctcgataaatgaatgaaaat

SEQ ID NO: 4551 - DNA, 439 bp, Lilium asiatic
ggcaaatgttgtaattgataggacttctgggtgctcgaaagggtatggttttgtgaagtttggagatccaaatgaacaagcacgtgcagtgacggaaatgaatggaatgttatgttctacaaggccaatgaggattggtacagcgactaccaagaagagtgtggttggtcagcagcaatacactgcgaaagcttcttatcagagcactccaggaacacagtctgagaatgatccaaataacactaccatatttgttggtgggcttgatcctgatgtcagtgaggatactctaaggcagctttttagccagcatggggagttattgcatgtcaagatacctgttggcaagcgctgtggatttgttcaatttgcgagcaggtcatgtgcagaggaggctttgctaacactcaatggtgttccgttgggtgggtataatatt

SEQ ID NO: 4552 - DNA, 267 bp, Lilium asiatic
  modified_base (237)..(238): a, c, g, t, unknown, or other
  modified_base (240)..(243): a, c, g, t, unknown, or other
ctcggttcggagtttagtagtgtttggtttttgtttaggcttagtttttctctctttcaaacattgtctatggtttaaattgtatactctgtttattgtaatggaaagttcgaagtttggtatgctttgcttgcatgtttatttatatttgttggttattgtctaaaaaaaaaaaaaaaaaaaaaaaaaaaaaaaaaaaaaaaaaaaaaaaaaaaaaaaaaaaaaaaaaaaaaaaannannnnccatcctaaaatacccaacacctc

SEQ ID NO: 4553 - DNA, 414 bp, Lilium asiatic
aatctccttcggggtgagccactgtagctcgttgatggtggccagtcccagagaacgtttgtgtacattaaggatgccattgaagcagttcttttgatgattgaaaatcctgctcgtgccaatggccacatctttaatgtgggaaatcctaacaatgaagttactgtcaagcagcttgcagagatgatggctgaggtgtattcaaaagtatcaggggagccaacaattgaggtaccgacgattgatgtaagctccaaggagttctatggtgaaggatatgatgacagtgataaacgtattccagacatgaccataatccataagcaacttggctgggacccgaagacttcactatgggacttactggaatcaacattgacttaccagcacaggacatatgctgaggctgttaag

SEQ ID NO: 4554 - DNA, 387 bp, Lilium asiatic
cggacgcgtgggaaaaattaaaattaaaatttttttttttaaaaaaaaaaaaaaaaaaaaagaaaaagaaaaatttaaaaaaaaaaaaaaaaaaaaaaaaaaaaaaaaaaaaaaaaaaaaaaaaaaaaaaaaaaaaaaaaaaaaaaaaaaaaaaaaaaaaaaaaaaaaaagggggggcccttttaaagaatcaaaattttcttcccctggtttggaaaatataatttttttttttggggcccaaaaataaaaataaagggccgggttttaaaaaagcgggaatgggaaaaaccttggggttaccaaattaaatagttttgaaaaaaaatccctttttttaaaattggggtaaaaaaaaaaaggccccaaccaatgcctttttaaaaa

SEQ ID NO: 4555 - DNA, 423 bp, Lilium asiatic
ccacgcgtccgggcatccacctggatctctttaagcacacactcttgcacaatggatttctcgaagctataggttgcacactggagttgaaataggccgagctgacatccaaggtggtgattccatgctgaaacttgtgtggcaccagtctgatgctatcatgtgctgttctctgaaggctgcacctgtgttcaccttcgctaatcaagctggtcttgacatgctggagacgacctttgttgcgctgcaagagattactcttgagaagatactggatgatgctggtcgcaagatgctctgtgcggagttccccaagatcatgcagcagggttttcgcctatcttcctgcggggatctgcatgtcgagcatggggaggccggcatcctacgatcaggctgtcgcatggaaagtgctgaatgatg

SEQ ID NO: 4556 - DNA, 315 bp, Lilium asiatic
  modified_base (36)..(36): a, c, g, t, unknown, or other
agggagaaggagaaggagaagacgacccccctctgntctccggcgcttgaagatgtcgtcgtctctggccgggcggcagcaggtccgctaacgctaaagtgatcggacaacgcccacaccccattcggggaccaaaaagacgaagttgtttacagtggcctttcctatttcggcacgaccggaagaaagctcagaggatgcaaaaacggggaactctcgttcgcccgaagcatcggaccaatgataacattatctttttgcgagcagagcggatcggcccctctaagaatggaatggagttactccttgcttaca

SEQ ID NO: 4557 - DNA, 409 bp, Lilium asiatic
atttgatttgtgtttggatagggattttatttttgaaacctgtgagttatggagacgaaatgattttctattatcatggaacaaagtgtcatgaccagtcgaattttttgtttttataaaatcatactattgaaattatactatttcatattttctgaccaattaaaaatctgctgaatagtcagttaatggtttcgcaccagaaatatgtgtatgccaaaaaccagcctagatttctgtttttaattttggttcaaaggtcggcttatctcatttatgcagacggtgcaatcattaacatgtctcttcacctctcatatggaggtatgcgcctcttagggcatcctggtttgctccaaaaaaaaaaaaaaaactcattaaataaaaaatttgatgattctacaagtcg

SEQ ID NO: 4558 - DNA, 411 bp, Lilium asiatic
  modified_base (140)..(140): a, c, g, t, unknown, or other
  modified_base (319)..(319): a, c, g, t, unknown, or other
gcactggtgtgtatgacgttcggttataaatttctttcgaaactggttgatgaaatccttctatgttttgtttctagtgtaagggctggagatgccctacattttggttgattgtaaggttcaactgttggaatcttcanaaaaaaaaaaaaaaaaaaaaaaaaaaaaaaaaataaaaaaaaaaaaaaaattaaaaaaaattaaaaaaaacaaaaacacaaaacatttaaatttcaaaatattcacccttttcaaaacaccgtaaaaactaataaaataaaaaaaactataaaataaaaaaaaaataaaaaatttatangggggggcctctttttaaaaatccaaatttttcatgggggcgtgttggctaataatttttttttaaggggcacaaaaaaaaattataggggg

SEQ ID NO: 4559 - DNA, 354 bp, Lilium asiatic
cggacgcgtgggcggacgcgtgggtggacgtttgggaaaatctcaccgctaaccttacccaccaaataaatggtctgagttagattgtgttatactggtcgggttatggggcaggaccaggttttgacagctctctatacagagctatacattttagaaggagaaaccaaatgtgactagatacttgggaaggttaatagacgccctttagtgtagtaggttaagtgtagttctttagtgtagtaggtcaagtgtagtagtaggaggttagaattaatattccatcaatttcggctgttgaattttcaaataaacccaagttagtaaatattgttcaaagcttttaacatgatt

SEQ ID NO: 4560 - DNA, 439 bp, Lilium asiatic
ctgtgccaggccctgtaacttcacttgttatgcgatcacataatgtgaaactgcacaaccagcaagcaacaaatagtgttaccattaacactgttcagacaaaggatctgcaggaaccaaatggcctgcctcaagtgaaatccggtcctccatctctgcacaagacacttgggaatggatcaaacctcgataatgggagggagacaacagggtcggcattaagttttggagctatgcccccttcacaaaacaatggaatgactaatgggagacatggttttggagggagacaacagggaaggtcttctgtggctggtttgatttcaaggagacagaattgaaagaggacctttatgtgtgataagatgtgccgaagctctctgattttgcttgtcggttggaattcatttcagtgactccatgggcgtattttattatt

SEQ ID NO: 4561 - DNA, 442 bp, Lilium asiatic
gggcctcggtccaagccggttagcaccaagctttggatggggtttatcaatggatattgagacaacatgaggaaagatcaagggtgacagcagctgatatagtagctcatatccagaatgagattgatcgtggagttgaagatgcagctgtcttacatagagtgcagtcccaataccagcacccgcaaacttcaccgatcattgcaactcccggcccacaaatctctttagtttcacatgatcagacagcatctcggaccggtcacctagatcagataagaaactctgttttttcaaatgccctttcgagccctgttcgtttgtgcctgcaaccgtaccaactagctcaggaagggagttgcccaatcggtggacctgcagtgaggagccatgattcatcgatggacatgcattccgatagctccacaaatgaacattactg

SEQ ID NO: 4562 - DNA, 419 bp, Lilium asiatic
cccacgcgtccggaccttgagacctttgaatacaaatgcattcctctaccaacatgctaccgtagtatagtcgaacgtgatgactttgaatactgggagatggagaacatacggttagcggtgttatgagggtccctttgcctgacttttgccttcggtcaacgtttggaattcttgatcttaaagaactacatcaacgcagagtgggagaaaagggtatactatcgatatgtccaatgccattgatgtcccaagagggtgttcttttcctattgaagcaatatgaatcatgggcgatggaagtgttctgcttagtgattctgggataaaagtaacgaatttgtggtgttatgatcctaaagaaggaattttcacactaaagtttgacgatatatttgcagcatctttatacgaggaga

SEQ ID NO: 4563 - DNA, 441 bp, Lilium asiatic
gacaacttctatacgagaggatcattgaggggcgaaccatgaaggaggatgtgatcagctcagggacgatggatcaacgtgtgttcgggaggtcatcatctcctccaacatcggcatcgaggctcatgtcttcacttctcaattggggtattgtggctttcctctcgaacaaccacctggactcatttaccagagtaacattcgattttatgcactaaaacctcccaccttggtcgattagcattcttcactacagaaataaagtgtttaacacggcaaaggtaggtgtccaaacatcacaaataaaaatgtcacccataaatgctcagtcaatcatgtgggagaagaatgacgaagagatcacttcattgggttctaatcccgtgattactacattattgggttctaaatccgttgattactacaactagtcttttggag

SEQ ID NO: 4564 - DNA, 443 bp, Lilium asiatic
ctttgattcggattcctccctctgttcgattttccgaatggcatcagtagaggtggaatctgctccagtcccggtggaaactgtaccggcgtccgcaccggttacagaaaaggctgcagtggaagccgcggaggcaaccgtagaagaggtgccagcgcctgcagcagaggagccgacagtagaagttaagaaggccgaagaggcggctgatgtggtagaaccggaagctacacctgaaccagcagcggaggcagttgtggaagagacaccgaaagaagtagcacccgaagctccggcagcagaaccagaggctgctgcggcagctgttgaagagccagctgcagcgccggcagcagttgaagagccagctgctgcggaagctgcagctccggtagaggaaggtaaggtggaggaagtgaaggagtctactccagtgtgattag

SEQ ID NO: 4565 - DNA, 338 bp, Lilium asiatic
ctcctcccaggatactcattttcatgctagtgtaaccggcccaaagcgtcggaagccatgctagtgaaacatctcagatatggtgtcaactttcactttaactgtactatgctggttgtgttgaatttctgctgtacatgtctatcaatatgtattccgaaggttgtcagaaaatatcaatatttgcttttattgattttctggtagagtttatggtcttgtcgttgtaagctaaagcaaaatgatgttttattatgggtcgaagaaatgtcaggtatgttaatacattatctataatctgaggtgccataaattgttgtatggtaatcctttcatcc

SEQ ID NO: 4566 - DNA, 426 bp, Lilium asiatic
  modified_base (10)..(10): a, c, g, t, unknown, or other
  modified_base (22)..(22): a, c, g, t, unknown, or other
cccacgcgtncgcccacgcttncggatcaatatggagaggatgccctcaaggaaggaatgggtggcggtggcggcggccatgatccatttgatatcttccaatccttctttggtgggagcccctttggaggtggtggaagcagccgtggacgcaggcaaaggaggggagaggatgtggttcatcctctcaaggtatctcttgaggacctgtacaatgggacttcgaagaagctctccctttctcgcaatgtcatttgttctaaatgcaagggaaaagggtcaaaatctggtgcttcaatgaaatgtgctgggtgccagggatctggtatgaaggtctcaatccgtcagctaggaccttccatgattcagcagatgcagcacccttgcaatgagtgcaagggcaccgggagaaagtatcaatgataa

SEQ ID NO: 4567 - DNA, 415 bp, Lilium asiatic
  modified_base (10)..(10): a, c, g, t, unknown, or other
cccacgcgtncgggcgaacccgggatcgctttggtgtgggatgtgccgattgtgttcaagggagaggatgtctgccccggactgaagaaaggtggatatctgcacaagataagagagagcttgaaatatctgtgcccaactgaacacatccctcaaaagattgaggtagatttgacgaaattagatatcggtgatggaattcttattaatgatattgaggttcatccttcattgaaacttctgatcaagagcgtggacaagcggcccatatgtaagatacgggcaacaaagcctgctcagcccgaacccaagattgcaccagaaactgtcacagagactccagagcccatggaagcttaatttactctactgaagatctgaaaaatttgagccgctttcgaggctgaatgtttga

SEQ ID NO: 4568 - DNA, 382 bp, Lilium asiatic
aatacatgtattccttagtaaacttttctttctccctcatgttctatcttaaaaatatattttagctcccctcttccaaattgtttcataagaaggtacgaaggtcatctcataagaccattacgaaggttgtactaagcatatttttttggagatcaaggagggtatcttaaagccatatgttctaaagagtaggctataagaagatttgttcccaccaactgactattcaaccaagttgtggatgtatacctcatattttagttctaaaatccctatactatggaagttaataacattttacatatttcaataattaaaacatagaaaaatcaacattaatcacatgtaataaaaaaagaaaataaaagatccatgatac

SEQ ID NO: 4569 - DNA, 368 bp, Lilium asiatic
  modified_base (367)..(367): a, c, g, t, unknown, or other
cccacgcgtccgtccacgcgtccgttacggtgctcctgatccgcaagctccccttccagcgcctggtgagggagattgctcaggacttcaaggctgacctccgcttccagagctcggctgtctcagcgcttcaggaggcatcggaggcatacttggttggtctgtttgaggacaccaacctgtgcgccatccatgccaagcgcgtcaccatcatgcccaaagacatccagcttgcccgccgcatccgtggcgagagggcttgaaatgtctctctgtttgttcctcctgtggatggtttctactgtctcgtagaaagttgtaattcggcagtttatgcagtttaattgaagtttgttatctgcccctnt

SEQ ID NO: 4570 - DNA, 404 bp, Lilium asiatic
ggaaataatatagtcgcaggagtgagaaaattaacctctcaatcctacctccctcatctataattgccatccttgttgagagacagagaggagagagaagatggggagaggaagagttgagctgaagaggattgagaacaagatcaacagacaagtcaccttctcaaagcgccgcaatggactgctcaagaaggcctatgaactctctgtcctctgtgacgctgaagtggctctcatcatcttctccagccgcggcaagctctacgagttcggcagcaccgggacaagtaaaacccttgagcgatatcagcaatgttgttacacatctcatgatactaatgccataaatcaggaaacacagagctggtatcaggaaactcgtaagttgaaggcaaaagtagatt

SEQ ID NO: 4571 - DNA, 427 bp, Lilium asiatic
  modified_base (392)..(392): a, c, g, t, unknown, or other
atctcgacgactcaccaaagcttgaagttcggatctttcagaaaatcgattcctatttgaagagtgcataaccgcatggataagctcacactaacccgtcaattttggatccaatttgggattttcttccttgggaggtatcgggaaggaattcgaatggaataatatcgattcatgcagaagaaaaggttctctattgatccaaacgctgtacctatgggatagagggagaggaaaaagccgaagatttcacatattttgatcgaaaaatcaatctgatttctttcgtacccttcgctcgatgagaaaatgggtcagattctacaggatcaacaaacctatgggacttaaggaatgatggaagggaataaaaagagagggaaagaaaatcngaatggaatttaataaggattaaaaccaaaccaaa

SEQ ID NO: 4572 - DNA, 417 bp, Lilium asiatic
cttatctggtctacccgttcctccggcaaatttagtggatgctacctaaagtttcagaggggtgcaaagttcgacatctacaacagtgccaatggtcttgtgtggcggctcccatttcgctggccggaagcaagttacatcttgatcgtacagaaaaaaccaatcatcggcatatatggccctcagagctggtcgaccaactgggacggccttacccatcactccactgcacaacccaataaccagaaaatcagcatggtcaccggcaagtgatggatctcgctgctggactactttcagtttgagaataatgtgcactgtttgttgtttggtttcagttcggaataatatccgctgttgttcgaatttagttccacgagtaccatggtattgtagtagtaatatccccgtgtaatc

SEQ ID NO: 4573 - DNA, 257 bp, Lilium asiatic
  modified_base (252)..(252): a, c, g, t, unknown, or other
  modified_base (256)..(256): a, c, g, t, unknown, or other
cccaaaatttaaaggggccatggttttaaaggcgggaaggaatggaaaaataaaattttggttttttaccggccattaggtcattcccccataaaaggaggcggggggcaaattaaggggcatggccggaccctattatggaaaggtttatttggctttcataagcccggtggggaagtttcacaaggaacatgtctggaagcttggttaactgcgggtaaatattttatatgaaggtttatttggctttcncccna

SEQ ID NO: 4574 - DNA, 441 bp, Lilium asiatic
cggacgcgtggggttctctctctacattcctagcgaagaatcaaatctccattaatggcgaagttcatcagcctctaacccggtgatcaacacccgttgccggagacctatctcgccatcgatcaacgccttacattgtcgtcactggagtcctattccgccgccaattaacaccaacagccgccaatcaccgtcattggaatgcgatcaggtcttaattgacgatcaagacacagaaacggggtcggtcgtcgaaggcaacaccgacaaagacaccggcaaagaaaatgaagtagaagaaggacgagtatgtgtggtatcttgtcatgtcgaacagtcgctttgtttctgctttctaactcgaatttgatgagatttgccgccagaacctaaggtagacggtaggagagatgctaaacaacagatctacttgatgatgct

SEQ ID NO: 4575 - DNA, 389 bp, Lilium asiatic
tgtcattgaggagcgtcttactgttttacttataaatgcgtatgtccagagttgtgacatggtcgccttcaacaaaatctagactttgctgagagggggaaatgctgtttgcagttgagtgggagactgttctgcaaaatgctaccagcgtgttttagtttatcttctataagagcctagacttgcaaaatgtttggattttgatggaaggattttgttttttgagacttgctgagtctggtattttagtactttcaaattattatggagcactatttattgtcctattagaggagttgtgtgtgcttgtggaatccaggtttcaattggaaaaaaaaaaaaaatataaataaaaataaaaattattattcaaaatctttatttttttt

SEQ ID NO: 4576 - DNA, 427 bp, Lilium asiatic
gttccgagggattatgattacaaatgatgtttatgaacagatgatcaatgtccagaacaagaactcatcctactttgtggagtgcatcccaaacaatgtcaagtcaagcgtgtgtgacataccaccgaaagggctgaagatggcagccaccttcatggggaactcaacctcgatccaggagatgttccgtagggtcagcgagcagttcacagccatgttcaggaggaaggctttcttgcactggtacacaggtgagggcatggatgagatggaattcaccgaggccgagagcaacatgaatgacctggtggcggagtaccagcagtaccaggatgcaactgctgatgaagagtatgaagagggaagaaaatgaggctgaaacctgaggtatattctcctctggacaatttttttcccttttgggctt

SEQ ID NO: 4577 - DNA, 395 bp, Lilium asiatic
gaaatgtgctgggtgccagggatctggtattaatgtctcaatccgtcagctaggaccttccatgattcagcagatgcagcacccttgcaatgagtgcaagggcacgggagaaagtatcaatgataaagaccgctgcccgcagtgcaagggtgagaaggttgttcaggaaaagaaagtcttggaggtgcatgttgaaaagggtatgcagaatggccagaagataaccttccctggagaggctgatgaagcgcctgattgcgtcactggcgatattgtgtttgtcctccaacaaaaagatcaccctaagttcaagagaaagggtgatgatttgtttgttgaacacacactctcccttactgaagccctatgtggttttaggtttgtggtgacccatt

SEQ ID NO: 4578 - DNA, 388 bp, Lilium asiatic
caagtattatagatctctatcaatggcggttttcacacagcggccgattagcaagctccgatggggcgagctcgacgaggacgacggcgaggacctggcgtttcttctgccgccgcccatggtggagggccccgaccagaacgggatcaagcgggtgatcgagtacaaattcgatgagaatgataggaaggtgaaggtgacgacgaccatcagggtgaggaagatcgcgcgggcgcatctgagcaagcgcgccctcgagcgccggtcgtgggctaagtttggggatgctgttaaggatgagcccgggagtcggttgactatggtgtcgactgaggagatttttcttgagcggcctcgtgcctcacgtagcaaacaagaagaacctttg

SEQ ID NO: 4579 - DNA, 242 bp, Lilium asiatic
caaggttcatgctgcacctggtggggggtgtttccttggctacctttttggtggccgtagcaactgatggcatttctatgctgctttagaactgcaccaagtgattgcagatttctagatgaagagtggcttaatcatgtaatatatacctaaggccgaggccagaaacttctgccccttggttggagatttgtgttctctatttttctgaaaaatctttgcaagctcttgctgttcggcct

SEQ ID NO: 4580 - DNA, 77 bp, Lilium asiatic
  modified_base (28)..(28): a, c, g, t, unknown, or other
  modified_base (35)..(35): a, c, g, t, unknown, or other
  modified_base (67)..(67): a, c, g, t, unknown, or other
acttacaagggagaccgggatccactgnaggcctnaagaggaacatgagggaagatgggaggatcangacttttttc

SEQ ID NO: 4581 - DNA, 441 bp, Lilium asiatic
  modified_base (337)..(337): a, c, g, t, unknown, or other
ccaatatgaaggatggtgatgtctttacttttctacctccgcaagcgaagcgtccacgactgaatactacttatgacaaatgtactgatgaagatgcaatcacaaggattgcatctgcagtggagaagttcacagagacttacgctgaggcgtccaagcgtactcccttcactgatatcttgactgcgttggaggagactcctgatctcactgaaacagactactctagagctgttacggtgctagcttccaatccaaagcttgcagatgccttcattcttctcccttgtcaccgtcgtgttgcttggttgcgctctacttttcgttgatgcattangataaggcatgttatgcttttcgttatcaggatcatattggacatgtcaaacttgtctaatgtgtattctgcatatttgtagaatatatgaatttgggtatatg

SEQ ID NO: 4582 - DNA, 148 bp, Lilium asiatic
  modified_base (49)..(49): a, c, g, t, unknown, or other
  modified_base (147)..(147): a, c, g, t, unknown, or other
aaaagtcggcttcatgatttgggttttttttttctgaggtaaccttcgnttagtagtttgtatgggcgtcaggtggtggcccgcattttgcatcggctcttgtgaaaagctgttaaaatctttgaatatggctggtttgagagtttnt

SEQ ID NO: 4583 - DNA, 390 bp, Lilium asiatic
gaatgctgacaaagatctgtgtctcaatatgttggccgggcacgagagctctgtcacttgtggtgatttcacccctaatggtaatataatttgtactggttctgatgatgcatcattgaggatttggaaccccaaaaccgggaaatgttcatatgctgttagagggtatccatatcacacagatggtttgacatgcttgtcaatatccccggattctaaaattgctattactggttcgaaagatagctctatccgaatggtgaacatcgagactgggaaggttgtcagctctttatacgttcacacagattcttgtgagtgcattggtctttcaagttggccgcgggcttcttttaggaaacatggatcaaaagctcgtcatttgggatc

SEQ ID NO: 4584 - DNA, 262 bp, Lilium asiatic
  modified_base (13)..(13): a, c, g, t, unknown, or other
  modified_base (63)..(63): a, c, g, t, unknown, or other
cgacccacgcgcncgctcccttctcttttcgaatggccttttcctttcatactgcccgcaagnccaccggaggcggggctccccggaagcagctcgcgaccaatgcggcacgcacgttcgttccggccaccggccgcgttaagaaaccccaacgattgcgtctcaacacattagctctccgtgagatccgcaagtaccagaagagcaccgagctcctcattcgcaagctccccttccagcgcctcgtccgggagatcgccca

SEQ ID NO: 4585 - DNA, 354 bp, Lilium asiatic
ctctcctatataaagaggaagaagagcctgttaagcgtcagcagagacttgtctcacattccgagaggaagtaaggggagtggccggagggacttgcttttctgtggagaataagttggggagagttgggtattctttgtgttaaagtttatgagagttaagggttgaagttatgaagatccagaagctgtgaatactacttagatgttgaagttctagttctactctcctcagatcatcattttgttgtgagtaatttataatttctctctgatgttaatcatatgagtgtgatacagttagatgctagatgttatggtgataatgaaatattgtaatggtttatttgagatc

SEQ ID NO: 4586 - DNA, 428 bp, Lilium asiatic
cggacgcgtgggcggactcgtgggttgacttgtgggtcttaagtgatggctacaggtggcgcaagtatgggcagaaaacagtcaagggaaatcccaatcctagaagctactatagatgcacccataacggatgtcccgttcgaaagcatgttgagcgtgcttcagatgacgaaaaatctatcctcatcagttacgagggcaagcacaaccatgacctgccaggtcccaagaataacagcgacccaccagctagccctctgatcgcttctgcaatgacagtgacttcgggcgaacaaataccttcatctcagtccttgccagagcagaagccactggagctcggaggtgagaaagcaccggaatctgcactggtgggtgttagcatcgggcacaactcatctacgggagaagatcgtgaatgcctgaat

SEQ ID NO: 4587 - DNA, 295 bp, Lilium asiatic
  modified_base (10)..(10): a, c, g, t, unknown, or other
cccacgcgtncgtcagcatcaacataacaattagatgtgctgccccgccatgggccagctgctctgaaataccctttactacaagcgtttcttcccgtactacgctttcaatgtgctaggcggccttgacagtgaagggaaaggatgtgtgttcacatatgatgctgtcggttcttatgaaagggttgggtacagtgcccaaggttcaggctcaacgctcatcatgcccgtcctggataaccaactgaaatctccgagtcctctgttgttgcctactagagatgccgtgactccg

SEQ ID NO: 4588 - DNA, 359 bp, Lilium asiatic
aaaataaaaaaaaaaaatttaaaatttaaattttttaaccaaaaaaaaaaaaaaaaaaaaaggggtaaaataaaaaaaaaaaaaggaaaaaaaaaaaagggaggccgaaataaaaggtaaaaggtttagaaggataaaatttaaatataatgggtttgctattttaggggcctccttttttttcccccccccttccttaacaactccttttttgttaaacccctaaatttacaaaactttgtcgtctttcaacacatccccctttaaaaaactccttttttacccaattgtcccgcccccaacaacccccccccctgttcccctttccttattgggaaagggcccccccccctatcccc

SEQ ID NO: 4589 - DNA, 300 bp, Lilium asiatic
cccacgcgtccgcgatacgtcgccgtacaagctgtttgcggcggtagatgtctgccctcccgctgccagagctggaggtggaggccttggccggcgtggtctgcccgaccaagaagcgtgatcagccggcagttcggtacggtttctggtttatgtttgaaataatgtattatgtttgaaagggatcgtgtatctcatggtatcccgttgttttcaaatcacatcattagaaatggagtgatgtgtttattttctcaactttgatgaatcagtaaattgagtagcaggactgttggaatc

SEQ ID NO: 4590 - DNA, 379 bp, Lilium asiatic
ctttaacatggtcaaatcattctttttggaaagtcctgaagaaaattgcttcaaggggaggaagataccagcaaagatcatagtttacgatacattcaaaggtttagttctttttgggaaggtgaatggtatgcacattgttaatcccatcacaggatacactcttaaccttcctccattctctcaatatgatcattccgttgttaaagcaagcattggacctcttgtttatgcaagaattggatacgattcttgcctcaaaaagtacaaagtgatcattgttcattggacgaaatgtcatattattacactgcaggagcaaggatgtagcgcatggagggagttggacatgccaccccttattagtatgatggcaaat

SEQ ID NO: 4591 - DNA, 386 bp, Lilium asiatic
cggacgcgtgggcggacgcgtgggctgacgcgtgggggagtacaccggtgggcagggggaggaggttgcttgtggactttctcgagccttccattcgatgccgtacctcgtcggagccggaggttctgataccgatgccatgtgcagcggcagtgagactggcgactcgtgcagcggtggtgacggcgacggcagtggggacgacgatgaggagtgggagttcatgcggtgcttgagcgtctgagatgacgggggtaagttattaaccgtgtgggtttgtcaaagtagggtcgtcggagcgtatcgttcttttttccgctgctgctgctgtttaatttgaactttaatcgagtctgttagttatttccatcacttatcttagtttg

SEQ ID NO: 4592 - DNA, 377 bp, Lilium asiatic
atcgcaaatttgagcagcttcaacagatatctgatgatccaaatcaaatttctcaggtatttgagaagtcgatgcaatatgtgaagcgtttcagtcgctacaaaaatccggacgctgttaggcagatcagagaaatcttaagcaggaatcgattggctgaatttgagctttgcgttcttggcaatctctgccctgaaactgtggaggaagctattgccatggtaccatccattaagaacaagggacgggctctcgatgacgacgcaattgagaaaatgctgcacgatctttccctgataaagaagtttgtgtagcatcatcaatgcttctaaacgggtatatatatatatatatatatatatatatatatatatata

SEQ ID NO: 4593 - DNA, 391 bp, Lilium asiatic
gcgagatctccccgccctcgccgctgccgccgcgctccgattgatcgccgccggcgatggggttcgtcacgtttgccgggagagtgctcttcgcctctgtcttcatcctctccgcgtaccaggagtttaacgaatatggactggatggtgggccagcagcgaagtctctcagacccaaatatgacattttcacaaacctcgtgtcctctcatcttggtgttaaagtgccagaaattgaaatgaaacatgtgattgctgccaccatagctgtcaaagggcttggtggccttctgttcatcttcagcagctccttcggggcttatctcctgctaatttatttggcgcttgtcactccgattgtgcatgatttctacaactatgactttgagac

SEQ ID NO: 4594 - DNA, 382 bp, Lilium asiatic
ggaggccataagggcagtggctcatgggcgaaatcggcgactcgctcagtcaaggcggcgctccagttccccgacggaaggatcggccgctacctcaagaagggccgctacactcagcgcgtacgatctggagcttcggtctacctagctgacgtgctggagtatctagctgccgaggttttggaattagctggaaatgcaggccgggacaacaagaagaaccggattgttcctcaacatgtgtgtctggcggtgaggaatgatgaggagctcgtgaggctcttgggtggtgttactatcgctcatggtggacttttacccagcatcaaccctagcctgctgtcgaagaagactgggaaggagggggtggagcccaagagtc

SEQ ID NO: 4595 - DNA, 300 bp, Lilium asiatic
  modified_base (2)..(2): a, c, g, t, unknown, or other
antaaaaaaatcgaagtgaacaaaaaccgatagaaaaaaagaaaccctgggcggcggccttggaaagccaagcttattacctttctgttccaagccctaaattcttttatatccaagccgcttacgattgaaggggccccttttttacaacgtcgggacgggatgactctagatgaaaccatcatgatgcccctggagactaatccccctttagggaaaaaacctcatagacaaccggcccaaaccgatcggcttctcaatcacttgcccaacctgaatgcaaaagtgcacggtctcatg

SEQ ID NO: 4596 - DNA, 380 bp, Lilium asiatic
ggaagttctgctgtcaaagagactcgttgtagcatgagttgaagaaccaatatgcggggttgagacattgggtgttgatcatatatattggacactgttggctttgatcaactatttattgagaaacagactttgtcaggcaggatcaaggagaagtaccccgacaggattccggtgatcgtggagaaagctgagagaagcgacataccaaatatcgacaagaaaaagtacttggtgcctgcggacttgacagttggtcaattcgtctacgttattcgcaagcgaatcaagttgagcgcagagaaggcaatcttcatatttgtagacaatgtgcttccaccgaccggatctgtgatgtcgactatatatgatgagaagaa

SEQ ID NO: 4597 - DNA, 85 bp, Lilium asiatic
cccacgcgttcgcggacacctgggcgcgtctcgtcagggagtccaaacttcgggcccctctggcaccgcagcttagcaagccatt

SEQ ID NO: 4598 - DNA, 391 bp, Lilium asiatic
tgctacatcagaatagtctcagtagcatctaaccccaaaaccatacaaaagccagtgcttccatcactctcctttctctttgcaaaatttgtattaatactttctagccaaatactccaaaaacatcagataccctttccatctctaacgacgtttactctggagactcacacaacttgaaatacggatacactatgggatactactatcagaagtgacagttcatgcggcgcttgaacgtatgacatgacgggggtaagttattaaccgtgtgggttggtcaaagtaggggcgagggagcgtatcgttcttttttccactgctgctgctgtttaatttgaactttaatcgagtctgttagttatttccatcacttatcttagtttggtaa

SEQ ID NO: 4599 - DNA, 397 bp, Lilium asiatic
gcacccaaaatcacatcagatcatattccggatgctagccaatgataacaagaactgacccttttgggttctttttatcccagtaccatattcctgattttgacactgagatggaaagatagtggaagaaagctcggtgtacatggtctaacaatttaaaatatggagcaaattttgcactgttgaaaagcaaatacatggttggtatagagaggaacaccggcagaactgcttacaagaagaaataagagtatagattaaaagaagaaaatattggactggctgaggatgaatagggagagaaagaaaaactgataaaagatcttgatcaaacacttcttggagaaaaggcggactgacaagtcaagatgtaacttggttaaaagaggacagaaac

SEQ ID NO: 4600 - DNA, 380 bp, Lilium asiatic
ccacgcgtccgaaaaaaaaaaaaaatttaaaaaaaaaaaaaaaaaaaaaaaaaaaagaaaaaaaaaaaaaaaaaaaaaaaaaaaaaaaaaaaaaaaaaaaaaaaaaaaaaaaaaaaaaaaaaaaaaaaaaataaaaaattatatattttataaaaaataaaataaattttttaaatttttaaaaaaaaaaataaaaggggagtccttttttaattcttttttttttctcttctttttttaaaactttttttttttttttttaaaatatttaatattatatattctttgctctttttaaaaaatttgggcaaaaaattctttctttttcactcttttttaattgtcataaaataacccctttttgctcttttttttttaag

SEQ ID NO: 4601 - DNA, 409 bp, Lilium asiatic
  modified_base (6)..(7): a, c, g, t, unknown, or other
  modified_base (20)..(21): a, c, g, t, unknown, or other
  modified_base (25)..(25): a, c, g, t, unknown, or other
ccgggnncgacccacgcgtnncggnttcatctgcacgccgaggaaacatgtctggtctaccaagatctgatctccaatgatgagctcctctctgattcatttccctacactgagattgaaaatggtatgctgtgggaggtggaagggaagtgggttgtccaaggagccctcaatgtagatattggtgcaaacccctcagctgaaggtggtgaagatgatgaaggggttgatgaccaggccgtaaaggtggttgatattgttgacaccttccggcttcaggagcaacctgctttcgacaagaagcagtttatggcatacatgaagcggtatgtcaagcagttgacgcctaaacttgatgccgagcagcaggtgctatttaagaagcacattgagggggccattaagtttc

SEQ ID NO: 4602 - DNA, 342 bp, Lilium asiatic
gcacccaaaatcacatcatattataatccgaatcctagccaatgataacaaaaacggaccctataattctcctttggaaggatcaacctctacctcaataaccgccgctacactcagcgcgtaccatctaaagctccggtctacctactaacatgctaaatatctaccatatcttgcactgttaataagctggaaatgcagcccgggacaacaagaacaaccgaattgttcctcaacatgtatgtctgacggtacaaaatgataagaaactcttgaacttcctgagtatgaatactaatactcatcgtgaacttttacctagcatcaaccctatcctgctgt

SEQ ID NO: 4603 - DNA, 337 bp, Lilium asiatic
aaaaaaaaaatattgatatactagcatttctgattataaacactatatgaagctcggggaaagatgaattatttggctcttcctgtactggagataacgtcacgtcccgtggacaactataatgaccacctgtctcttactgtcactgatgattactatcagaggctatgctatcttccaaagactaaggttgcttgttttaagcattcgtctcatcttcttgttaggccgaacgctgttgactgaatgggctcccaatgtattagagggtgtaccttaccatcatgactatccattgcatccggagtatgcaatgtgctttgttgatagaaaatca

SEQ ID NO: 4604 - DNA, 389 bp, Lilium asiatic
cccacgcgtccggccacgcgtccgttcacgcgtccggtggtttgaaaaggaaggatccggaaggcggctgggatgcagaaagatttgttagttacaaacagcatccgtggcagtaagaagacaaaagacgcattttatttgcccgagtgtttgatctttcttcgccgagtcatgaagtggaggtctcctgtggaaagctcagatctttcttcgccgagtcatgaagtggaggtctcctgtggaaagtgtaactttatgtacttcttgtaaatgttgaagaaacatggtctgcttggattggccacatgatttgtactgtaacagttttatagcaccttgcaggctgtcttttctggtatggtaagctcagggaggtttacatggcaaaa

SEQ ID NO: 4605 - DNA, 376 bp, Lilium asiatic
agaaatggcatatggatgtgctgcaattactgattttcaacgctttatcaggctttgtaaagatgaattatttggttcttcctctactggagataacctgaagtcccgtggaaaactttatgaccaccggcctcttactctgaatgatgatgactatcaaagggtatgccagattccaaagagaaagggtgcttgttttcgggatttgcctggtgttattgttgggccaaacaatgttgttgaatttgatcccaatgttgagagggtgtacttaccatctgggaatcccttggttcctgagtatgcaatgtcctttgttgatggaaaatcacccaaaccatttggtcgactgtggtgggatgtgactgttccaaca

SEQ ID NO: 4606 - DNA, 388 bp, Lilium asiatic
gaagggcggcaaggggctgggcaaggtcggcgccaagcgccaccgtaaggtcctcggggacaacatccagggcatcaccaagccggccatccgccgccttgctcgccgcggtggcgtgaagaggatcagcggcctcatctacgaggagacgcgcggggtgctcaagatctttttggagaatgtcatccgtgatgccgtgacctacaccgagcacgcccggcggaagacggtgacggcgatggatgtggtgtatgcgctgaagaggcaggggaggacgctgtacggcttcggcggctgatgggtctgatcttctgtaagctatagtggtgctggtgtctatttctttttgttgttgaatgttaatgctaggacttctcgtatgtttcct

SEQ ID NO: 4607 - DNA, 287 bp, Lilium asiatic
cccacgcgtccgcggacgcgtgggtttcgaggaaggataagtacatggctcttgcgggcaatgatgggtcggtggtcggaagggcggataaaaagtccagcaaaatcatgggttgttagtgagagatgcattttgggtttgctttgtttggaagtcccatgaattttccgtattagtgtctggtgtttgtgtttgaataatttgtatatggaaggtgatgcagtatgtaagcatattagcaatacaaaatatttttgtggaaaagcatcccagaaagttttaccctt

SEQ ID NO: 4608 - DNA, 101 bp, Lilium asiatic
cttgaataaaaccggagaggaggctgaccctacagtttactctagccatgatcggggatgctggctaatatgcatccactgcagttaacatacaagtatca

SEQ ID NO: 4609 - DNA, 386 bp, Lilium asiatic
cggacgcgtgggctcgcaccaagcagaccgcccgcaagtccactggcggcaaggctgcccgcaagcagctcgccaccaaggcggcgcggaagtcggcgccggccaccggcggcgtgaagaagccccaccgcttccgccccggcacggtggcgttgagggagatccgcaagtatcagaagagcactgagctcctgatccgcaagctccccttccagcgcctggtgagggagattgctcaggacttcaaggctgacctccgcttccagagctcggctgtctcagcgcttcaggaggcatcggaggcatacttggttggtctgtttgaggacaccaacctgtgcgccatccatgccaagcgcgtcaccatcatgcccaaagacattcag

SEQ ID NO: 4610 - DNA, 231 bp, Lilium asiatic
caaaagcttaaagtgataaagttgtttcaccgctgtgattcgtcgaggtgccatatgtatttctctcctatcccttgtgttcaagcattaggcggggtttctctgctactgttatgagatgtacatatttatgtggtattcttgagttaatttttttgtaactttaaagtgacttctatttagtagacggtataattgttggtttgtataatgaataatgttactgcctcc

SEQ ID NO: 4611 - DNA, 363 bp, Lilium asiatic
ggtggtggccgaggcggcggcggcggtgggtcttgctacacttgtggcgaagccgggcattttgctcgggagtgccctaccatgaaataagcggagaccgccatcagataagttgtgttatgcgttgttgatgtttgggttcataaatgctctagaattgtatctcgattctaggtattgtgttttggtttgctgtcgtatttttggtttgatgaagtattgttgctttttggggagaggcatgggccttgcacattctgttgataatttgtaactcttccagctctttttttagtgcacataatatgtcactaaatattgatgatgaatggaaatagagtgatccatggtggtgtccttttc

SEQ ID NO: 4612 - DNA, 54 bp, Lilium asiatic
ccgtccgtgcgcatatccaattgtttcaatttaccatgtgtcgagacgagtata

SEQ ID NO: 4613 - DNA, 387 bp, Lilium asiatic
ggaaaaaatggtgaggaggaagagggtaataaggcggattgaggacaccaacaggcgccaggtcactttctccaagcgtgggagtcgactgctgaagaaggctttcgagctttccgtgttttgcgattcctaggttgcgctgatcatcttctcgcccatgggcaatctctgcgagttctccagctgcaggttaggctgttatcggttccaatcaaggagtattctgcttggcctcctgcatcgcggaccagctgattggaattgtgcttataatgctgctacttttataataacttttcacagttatccattgttttcagttacgactacaactattacccgtatgtatcaactctcttgcagtattctcaagatatatatcattta

SEQ ID NO: 4614 - DNA, 387 bp, Lilium asiatic
aatatacagtttggtcttcaaaaaataccgcccgcaagtacactggcaagaaaagggggaaaaaagcaaataaaaaagggggccggctttttaggagcttaccttttttcatccgcgtgtatgaaccctaccgctttctttttggtgccgtatattttttgttctttcgccggttttttactttggggagtctgaaaaacctgtggttttccaattttttatcgttttggactatatccctttttcgccttgtggcattatagaaaagaggcccccaccgatcccttttcaaaatagttgcgcactctatatggattgtgacacgccctttatagcggcttattacgcgcggggggtgtggttttttcgcgcagggtgacttttttt

SEQ ID NO: 4615 - DNA, 381 bp, Lilium asiatic
gctggcgggcatgcaggacaatcctgcttaccctaagttcactattaccggaggtggagctcaaactatcacggccgggtcagcggatgatccccgccgtggcacgggtccgcttgggccgtttacgggttatggcgggatacttaagagctctaaattattcaatcctgcttaattattacttgatgtgttttgtagtatggtgtatgggacgaggccggggaggcagtgtgatggagcacgggggagcatcagtaggtgtgatggtagcattggtgatcagagtgtgtctattgcaagggatgggaattcgggggtgtcggcttcttcgttctaaagttcaacggaagctggaagccgtgatggatctagcaatattct

SEQ ID NO: 4616 - DNA, 60 bp, Lilium asiatic
aaaaaaaaaaaaaaaaaaaaaaaaatttttaaaaaaaaaaaaaaaaaaaaaaccaagggg

SEQ ID NO: 4617 - DNA, 396 bp, Lilium asiatic
cggacgcgtgggcaagaaggtgcattttgctatccgcgaggatccaacaatagtgggggccaccaagccaccaccaaaggagcacaagaggtacaatttgaagaagctgacctatgaggagaggaaggctagtcttgttaagcgtttgaatgccctcaatgatgccaacaatgatgaagatgatgaggatgatgattgagcttttgttaaaccgactttaaattcgtagtttgtctgaagagttgaacttggtatttttgcgtttttatgttatgttggcagcttgtgttggtaaacttggttctgctctttcttaagtactttgaaattttgacttaggctgctcaataacttctaaaatttggctatcatttgatatgatagggccctttttat

SEQ ID NO: 4618 - DNA, 91 bp, Lilium asiatic
ggcggggaacccggtggtgcacgactcccgtttcggcgaggcggcattcccgttcgcctcgttttcaatgtcaccggacaagccctgcacc

SEQ ID NO: 4619 - DNA, 388 bp, Lilium asiatic
cggacgcgtgggctaggagccgattttgttcaaggccggtgcgcaaatcttctggggtggcgggcttgactacctaggaaaccctaatttggtccatgcacagagcattcttgctgttctagggtttcaggttctcctcatgggtgcagtcgagggcttccgcatcaacggcttgcccggtgatggtgagggcaatgacctctaccccggtggtacctacttcgacccgctggggctcgctgacgaccctgtcacattcgccgagctcaaggttaaggagattaagaatgggagcgtggccatgttctcgatgttccgattcttagctcaagccatcgtcaccggcaaggagacgctggagaatctgttcgaccaccttgacaacccc

SEQ ID NO: 4620 - DNA, 380 bp, Lilium asiatic
  modified_base (258)..(258): a, c, g, t, unknown, or other
caagacggtgctcaaatccctcaggggatctaaagggaagttggtgattatagcaagcaactgcccaccacttcgcaagagtgaaattgagtactatgctatgctgtcaaagattggagtccatcatttcaatggaaataatgtggatctgggtacagcttgtggaaaatatttccgggtttgctgccttagcattattgatccacgtgattctgatatcattaaaaatctctcgggtgaccagtgagaacttgttgntcgatggataatcttatttccttattttcagcttttagttgtaattgtgactgctggttgtagccaaaagtttttcatgagattttgaaatttaaaagatttagcctgggttgatgaacttg

SEQ ID NO: 4621 - DNA, 395 bp, Lilium asiatic
tttgtttttgagaccaaagtgaagcagactttccatgcttcccctgctgttgtcaagttccgtgtcccgacaaagtccactccactggaggcctactctactcccgttctgccactggatattctcgctgatcgggctccagagaagaaatttgaattggcaaaaaggctcctagcgaaatatggatctctggtttcggttctctcatttgttggcctgtttatctacatcgtagcaagcccttcgaaatcgaacgtagttaaaggaggaaagaagaaacgatagatggttactgaagttgccttgtgagttttgttcttatggtacctttaaagtgttttccatcatttgcggattttgtgatacatttgtaggttttcggatagcatctcgtc

SEQ ID NO: 4622 - DNA, 363 bp, Lilium asiatic
  modified_base (291)..(291): a, c, g, t, unknown, or other
cggacgcatccgcgaggagccggactctcccatcggcgaggcgcgattctcgttgggctgctgtctcatgtaactgggcaaggcttgtgcccgtgcgcaacatgggatgataccggcggcagtgagaattgatggctttgagtgccgcgaccggccgagcatcaccggcgtggcattacgtaaatatttttacccaacaaaccagatgagaggtactattgacaccattttgtgctcaacaatttgaggatggagtatgatatttctgtacatgggtttgaactaaagttntcgtgtatataagctactgcaataagggagagtcttgcgttctttttttaatgagaaaatatctcagaaatc

SEQ ID NO: 4623 - DNA, 237 bp, Lilium asiatic
gaaaaaaataaaattaaaaaaacatatataaaaaaaaaaaaaataacaaaccaaacagaaaatttaaaactttcctgcccttacacacatcatactcaccatatattcgccgcccccttaattcctttcccccttccttctccctcccacataccacctggttattctttatcgccccctaatttcctcgcctctccccccctatttcttttccctttttaacccctccctttcccc

SEQ ID NO: 4624 - DNA, 149 bp, Lilium asiatic
gggttaaccttttttccccttcacacttctgttgttgtttggttccccttaagggggggggttttcttccacctttcttaaaatggagctcggcagggttttggttaaacttgacaatgaaaccgtcttgatcgagcttaaaaaccgga

SEQ ID NO: 4625 - DNA, 390 bp, Lilium asiatic
ctcaccgccagctttaagatgccggctggtcacggccagcgctcgcgcacccgcgagctcttcgcccgccccttcaggaagaagggatatatccccttgacgacctaccttcgcacctaccacatcggcgagtatgtcgatgtcaaggctaacggcgccatccacaaggggatgccgcacaagttctaccatggccgcaccggccgcgtctggaacgtcaccaagcgtgccatcggcgtcgagatcaacaagcaggtaggccacagaatcattaagaaaaggatccatgtgcgtgttgaacatgtgatgccatccaggtgtactgaggaatttcgtctgcggaagataaagaacgaccaattgaaggctgaggcaaaggctcgtggtgag

SEQ ID NO: 4626 - DNA, 201 bp, Lilium asiatic
ggtatatgctgcagtatcccaacacatcggatcacactgggattggagggctcaccgggaaggggatccccaacagcatttctatttgagagtcagtgaagtaaggctttttcaaatgcttaaaataaatacgaggtcatgtgatccttgtctagtgttgctatgtgagtttatattaatatccttctctttgtagttgcc

SEQ ID NO: 4627 - DNA, 391 bp, Lilium asiatic
ctagacttcaacttcagccacagtttttatggagaccggatcgaaggccaagaagggcgccggcggacgcaagggcggaccgaaggccaaatgcttgagcctatccggccactcgcgtttgtcgagctcgtccagcaagattggccgcttcctcaagagccgataccggagtgctgaagattttgtgtaacaagcgaggagtaggtggacgaacggcctaatcgcgccccccaggttcttagcttcccgggggcgatgacggcagtgacaacaagaagaaccggattgttcctcgacatgggtttaggaaatggaggaatgattaccaacatgatatggtggaggtgatcccgttgcataatcatcaattgagtcgggatatcgatgcatg

SEQ ID NO: 4628 - DNA, 197 bp, Lilium asiatic
caccgtcacaagtccaatctcaatccccaatcccgatggcgccgaaggccgagaagaagcccgccgccaagaagccagcggcaacgccgcccccggaggaggagaagccggcggttccaccgccatccgaaaagaagccggcggagaagaagccgaaggccggcaagaagctgccggtctccaaggagggggactcg

SEQ ID NO: 4629 - DNA, 385 bp, Lilium asiatic
cacacgcatacgctcgtgagatactgacgggggggaaattgaggggtcactcttgtgatgcagagattgaggcatgccgttagatgggcagtgacacactcgattctacctaacgcgagtgagaatcgactacgctttacggctaatatgacactggagtacgtcctgttcgagaacttgtaagtgatgaaaagctaaaatatgaacatgtatttacacaatgcatgcctatgtgctccctgagaagtagcactcgagtgcttacacaaaaggttctaaagtaatgggcatcggatttagagcaaaacttacttcgaccgcttgctacctacaaccaatatagaaagtcgcgacatagtagaactagtttagtgagacaaggaaa

SEQ ID NO: 4630 - DNA, 387 bp, Lilium asiatic
ggttggacgaaggagagcgagatgagctggcgctgttcctgtccggctcgaaagtgtgctcagccagcgagtttgaagaggcatccagcagctgctcgaggttttctggccactcgcgtttgtcgagctcgtccaagaccaaggggagctgtgctagtgccgataccggagtgctgaagattttggtaacaagcgaggagtcggtggacgaacggcctaatcgcgccccccaggttcttagcttcccggggttgactagtgcggtggagtctgcaacaaatatgagatggtatagaaatgggtttaggaaatggaggagtgggtaccgacatgatgtggcggagttgatcccgttgcataatcatcaattgagtcgggatatcgatg

SEQ ID NO: 4631 - DNA, 391 bp, Lilium asiatic
  modified_base (318)..(318): a, c, g, t, unknown, or other
gggtttaccctctctccccctcgacactccgctgtcgcttggatcccctttagggggggggttctcctccaacctctctcaagatgaagctcgtcaggtttttgatgaaactgaacaatgagaccgtctcgatcgagctcaagaacgggacggttgttcatggcaccatcacaggtgtggatatcagtatgaatacccatttgaagactgtgaagctcacagtgaaagggaagaatcctgttactctcgatcaccttagcgtgcgtggtaacaacattcgatactatatcctccccgacagcttaaatctggagactntactggttgaggaaacacctagggtcaagccgaagaagccgactgcagggagagcaatgggccgtgggcgggg

SEQ ID NO: 4632 - DNA, 389 bp, Lilium asiatic
gcagaagatctacttttgggagaactgcaatttgctttcattgctttcatgatggggcagtcacttgaagcattcttacaatggaaatcacttgttagccttcttcttagctgtaccgaggctccccttcatacaagaactcagctcttctcaaagtttctcagagtcatatatttccagctgaagcaaggttttcataacaccagcggagagggaaactcttttttcttagatgatgcaatgttctccaaggacacatttttataccaactttgcaaggattttttctcattggttctagaatctcgagttgttgatggagatctgatatcatggacaaggaaactgaagagactcctcgaaaaatcacttggattggattttgacgc

SEQ ID NO: 4633 - DNA, 370 bp, Lilium asiatic
cccacgcgtccgatcccccctagtttcttacttttatttatgacttgtaggttatgttatttcaaacactgtattccaaagagtacctgataagaattttgttgaggctgaaattaaattgatgttatattacaaagagataaaaaaaaaaaaaaaaaaaaaaaaaaaaaaaaaaaaaaaaaaaaaaaaaaaaaaaaaaaaaaaaaaaaaaaaaaaaaaaaaaaaaaaaaaaaaaaaaaaaaaaaaaaaaaaaaaaaaaaaaaaaaaaaaaaaaaaaaaaaagggggggggccttttaaggggaccaaattttacttcccgggttttggaaggtaaaattttttttttggggcccccaaaattaaataaa

SEQ ID NO: 4634 - DNA, 120 bp, Lilium asiatic
gacagcatcatgtctgagagcatgactgaagaaggtctgagttgctaaatcaccctcataacttctatcatcagtagtaatagtagtttttctcgtatacaagacttcagtatggtatac

SEQ ID NO: 4635 - DNA, 377 bp, Lilium asiatic
ccacgcgtccggggtgatccacgtctagcgaatcactcgcgagaaggtgaatggctccaccgttaacgtcggcatcaacccctccaaggtcgtcgtcacgaagctgaagctggacaaggatcgcaaggcgttactggaccggaaagcgaaggggcgtgctgctgataaggcgaagggtaagttctcagctgatgaggtggctgctgctgctggctctccgtcgctgcaagaggtcgattagtcgattgacttattgaggttattttgttatcaattagaactttctgttaagttttgattttgttgggaatcttgaattgtggctgtttttcttgtttttaagactgctatgttatcaaaatgctgtcttttggttt

SEQ ID NO: 4636 - DNA, 387 bp, Lilium asiatic
tgctttgctatgttgcgcttggagtttggatggtaaatacatactgactggtggggaagatgacctagtgcaagtctggagcatggaagaccgtaagatagtagcatggggcgagggacacaattcatgggttagtggagttgcttttgattcatattggttggctccaaattcagatgaaacagaagaaaatattgtgtaccgatttggttctgttggtcaggatacacaattgctcctctgggacttggctataaatgaaattgctgttccactgcgaggtccgccaggcgggtcacccacattcagcagcggaagccattctgctcactgggacagtattacccctgtaggcacccttcagcctgcaccaagcacgcgggacgt

SEQ ID NO: 4637 - DNA, 263 bp, Lilium asiatic
ctacaccgagcacgcccggcggaagacggtgacggcgatggatgttgtctatgcgctcaagaggcagggaaggacgctgtacggcttcggcggctgagatgtcaaggtccgggctgaaggaatgtgtttagttgctgttgctctcgtctgatctaggtctagggttttagatagagttccgttatcttttataatttgtcagatttctcatctgatgtctaagccgtaatcgaagtttgtttgagtaatcatctttttatgat

SEQ ID NO: 4638 - DNA, 372 bp, Lilium asiatic
ctagacttcaacttcagccacagtttcgatggagaccggatcgaaggccaagaagggcgccggcggacgcaagggcggaccgaaggcaaaatcggtgagccgatccgtcaaggccggcctgcagttccctgttggcaggattggccgcttcctcaagaaaggccgctattctcagcgtgttggctctggagctcctgtctatctcgctgccgtgcttgagtacctcgctgctgaggttcttgagttggcgggcaatgcggccagggacaacaagaagaaccggattgttccccgacatgtgtgcttggctgtgagaaatgatgaggagcttgggaggctgttgggcggtgttacttttgctcatggtggagt

SEQ ID NO: 4639 - DNA, 355 bp, Lilium asiatic
aagttttctaactgtactctaaaattttggaagaaccttcaaaaccaaactcagtgaccttggttgcgattcttaccgctcgtagtcattctggcttagtgtctgagggttacagaggctcagatgatgtgatagaaacctaccgcgtgaaacctctcggttggctctacattcagaataaacaatcttattgcacgatcaagcaggcttaacgtctcactgcatatcaacgaaaggttctcagtgacgtcgttttagttgatatggcgagccattttacgtgctagtaaaggtcaaagatatgttaaacttgcagagactgctttggacgatcttctaaagctagcacctgaag

SEQ ID NO: 4640 - DNA, 384 bp, Lilium asiatic
caattctctcagatctctcactaatggcgcccaaggccgagaagaagcccgcggcggagaagaagccggccgtcgaggaggagaagaaggcggttccggcggagaagaagcctgctgagaagaagccgaaggccgggaagaaggtcccggcctccaaggagggggcctctgacaagaagaagaagaggtcgaagaagtcggtggagacctacaagatctacatcttcaaggtgttgaagcaggtccaccctgacatcgggatctccagcaaggcaatggggatcatgaacagcttcatcaatgatctctttgagaagatggctcacgagtccgcccgccttgctcgctacaacaagaagaacaccatcacctctcgggagattc

SEQ ID NO: 4641 - DNA, 358 bp, Lilium asiatic
gttaagaatgttgctgtcaaggatcttaagcgtggctttgttgcatcgaactcgggggatgatccggctaaggaggcagccaactttacctcccaagtcatcatcatgaaccatcctgggcagattgggaatggttatgctcctgtccttgattgccacacctcccacatagctgttaagtttgctgagatcctgaccaagatcgacaggcgatcgggtaaggagctggagaaggaacccaagtttctgaagaatggtgatgctggtatggtgaagatgattccgactaagccgatggtggttgaaaccttctctgagtatcctccactggggaggtttgctgtgagggacatgaggc

SEQ ID NO: 4642 - DNA, 345 bp, Lilium asiatic
gttatatactacctacctgaccaaatatattggatactggaggtacatcactagcgagcggtttttgaaggccaagcctgaatattaactttatactatattaaaatacttcaagaactgctgccaggatgagaacaggcatggtgactttatctctgccttgatgaaagcccagccccagttgctgaacgactggaaagcaaagatatgggctcgattcttgtgcctctcagtgtatgtaaccatgtacctaaatgatagccagcggactgatttataagaacgaattggccttaacaccaaggaatttgacatgcatgtcctcatttagactaaccgcacgac

SEQ ID NO: 4643 - DNA, 353 bp, Lilium asiatic
ggctttgctgttgttgtcaaggattttaaacgtggcttacatacatactgtggggagagatgacctagtgcaagtctggagcatggaagaccgtaagatagtagcatggagcgagggacacaattcatggattagtggagttgctttcgattcatatacaccggctacatatttagatgaaacagaagaaaatattgtgtaccgatttggttctgttggtcaggatacacaattgctactctaggacttggatataaatgaaactgctgttgcactgatgagtccgactaagccgatagccacattaaccatcttaagccattctgctcactgggacagtattacccctgtaa

SEQ ID NO: 4644 - DNA, 296 bp, Lilium asiatic
  modified_base (12)..(12): a, c, g, t, unknown, or other
ggctataatatntttcgcaaggagtttgaatggcaaatacatactgactgacggcgaagattttctagtgcaaggcggtaccactttacaccccaagatattatcatgaaccaacctacacaatatcatgaattagtgtacttgcttttcattaatattgacctgctacatatctatataatacactaaaaaacataccataaccaatcggctatctcgtaaggatacacaatagctcctcaacgacttgactataaatgaaattgtatggtcaatatgattccgactaagccgat

SEQ ID NO: 4645 - DNA, 389 bp, Lilium asiatic
gcaaggtgccattgtcgccccaaactactgcaacaacgggatgcagaagttctggggtgggcagccaggacctgaatggtagcgcgacggaagttggtgttgggacattggcagtgcagcagaagggaggagcggttgctgcgaatactcaggcggagaagaagaagatggatgctaggaagaagagtctgaagaggttatagggatgttggattaatgtgggtaatggactaactttgctagaggctgggatgggtggtgaatggtaacgaagaaagttagaattgaactgaaatatgctgggacttaaaaactttgttgacactctcagtctaagatgaaacttgtctaaatttctgtgtatttattgtactatgacatgattgact

SEQ ID NO: 4646 - DNA, 388 bp, Lilium asiatic
gggatttcaaaagtcttcaaagttagatccatcgttgatttattttttcaaataggatttcctacattgcaaggtgtcttctccttctatattgagattttagggggggggggctttgatgtataatgcttaacgggtgaagtacaaaaagccaaagcaaagagattcccaggatctgccaatgttctcttcatgttgcacataaaatggttttagacttaaattaactaaatgctagatttagaagtaccaaataattgcggaattgtacatacaataaattttttttattcagtctgtactcctaatgctgagcaaacatatatacttgccacatgaatggcccttaggcagctgcattcgcatagcgaggagtgtttgctgtcaa

SEQ ID NO: 4647 - DNA, 395 bp, Lilium asiatic
ccacgcgtccgagatcctccccaattcgccaaagccttagcaatcaaatcaacaacggtgggtaaggtccacggatccttggctcgcgccggcaaggtgaggggtcagacgccgaaggtcgctaagcaggacaagaagaagaagccgaggggccgcgcccacaagcgcatgcagtacaatcgtcgcttcgtcaccgccgttgttggattcgggaagaagagaggtccgaactcgtcagagaagtagagattgatggaggaatatgtgatgttaagtatatcatgttgtctgttactattttgcttttaggatatctgattcggatggtgtttgttaatcccagtttttatgtgagtttttaaaatagacttcattttgagacatggttatgcttg

SEQ ID NO: 4648 - DNA, 363 bp, Lilium asiatic
atcaaacctacttgcaatgcatcgcaatggtgtccttgctctgcttccaagggcgggcacagttggggccatctttgccatcaacacgattggcactgcagaacaattgcgcaacccaaaagatgacaactacgtaggaatccagccgtgcctgaaccagtgtggtttctgcacgaggtcctttcctccactgtgcacctgccgtgatgagaagcatatctgcccatcctggtgcaagaactgtgagatgtcgacgcacacgatctatccgccgctatacatttgtcaggatctcattgtcaactactgcgatcacaactgtggcttggaaagcggagctgtcacatctgagtaactagctgc

SEQ ID NO: 4649 - DNA, 201 bp, Lilium asiatic
acataacatactagtggttcgcattacttatacgtggacatattagaggagatttaggtgccgatgctcgtagacatagtacatatacgaaatgtgagagaggcgaagaacgcggcgcttgaagctcaaaggaatttttttgaaaaccctaagatcaaagctgatagactgggggaggaaggctataaaatgaaggggggg

SEQ ID NO: 4650 - DNA, 344 bp, Lilium asiatic
gacccaggcgtccgcttttttttttttttacaatgactatttaatcgagtattcatagttcgggacacgaggaacctcaattactttgattattagagtatcattccaaatagggtcccaactatatattcacagtacagataatgacaacttacaattctagtgtctgcatcaagccacaccacacaacattctcgctgtaaatccaaatgcagcaatggcgtctcctcacacctgttctgattttaggaagtccactacagctgaaacccactcggcttgatgcgcagtatagcaatggtcggcaccttgaatgatgtgtatcttgtggttaggtaaattct

SEQ ID NO: 4651 - DNA, 395 bp, Lilium asiatic
gcagtgctcctgacggccgccgtcgccgtcgcctccctcgccggcgtcgccttcgcggccgacgcccccgcccccagccctacctccggcgccgccgcgctctccgccccaatcgccgccgccgtcttcgtctccgccgccgccttcctcggatctctccgccagtaagagatcccgtgcagatctattcgtttctggttggatttatgttattttgtttagcattgtgtggatcggggtctgtagatggattttagggtttgtgtgagagtagatctgacagatttagtggtgttgagtgtggaggggtttgttatgtaggtaataatggtggatacatgttgtttatgtgagtctgtgtggatatatttgtgttattctgcatagttgatttt

SEQ ID NO: 4652 - DNA, 339 bp, Lilium asiatic
tgctggacgtgataataggactgggtaagcaccaaattctgctggccgtgataggagcgggaaagcaccaaattctgctggccgtgacaggattgcaaaggcaccatattctgctggccgtgacagggctagaaggccccctcccagaagttatcagcggccagccccatattatccaagaggcctttcttatccagcaagggatccttatgtagaaccactcaggcctgttgcacagtatcccctaccggctcctgttccgtatggtacttatggacctcctgaggactattattacagtgctgagccccgtgagcctgtaaaatatcgcgatcccta

SEQ ID NO: 4653 - DNA, 314 bp, Lilium asiatic
cggacgcgtgggataaaaaaaaaattattaaaaaaaaaaaaaaaaaaaaaaaaaaggcaaaaataaaaaaaaaaaaaaaaaaaaaaaaaaaaaaaaaaaaaaaaaaaaaaaaaaaaaaaaaaaaaaataaaaaaaataaataaataggggcccccctttttaaaaaaataaaatttattatcccgtcctttcaaagtaataattttttttataggaaccctaaattaaattaattgccccccctttaaaaacctttaaatttagaaaaacattgctttactaaaattaaaggctttgaaaaaaaatcccttttt

SEQ ID NO: 4654 - DNA, 309 bp, Lilium asiatic
acataacaaaatagtggttgcattagttatactattaaatattagaggaaatttaggtaccaatctaaataattatcatactaataaaaatttgataaaaattaggttctttgtaccaatattaaatcttccttaatttcatcttcctgggttaattctcaaagtcatgggaatgaagtgctaaaatctcaattgtggtaaaatctgcatcgatttattactaattaacaataataataccttgttttcatgtaagtaccatatgtgtctatagaagatcactttaaagttaccaacagttagagaagt

SEQ ID NO: 4655 - DNA, 195 bp, Lilium asiatic
  modified_base (188)..(188): a, c, g, t, unknown, or other
gaaatggggctaggaattgataggctggtgatgcttctaaccgactctgccagtataagggacgttatcgcatttccagttttaaagattccacaatgatttctagagtatatgcttccaaagcaattgacgcatttgtatactgaattattttcatgagccatcaatttattgtatgtttacgaatnttaaaaa

SEQ ID NO: 4656 - DNA, 380 bp, Lilium asiatic
  modified_base (361)..(361): a, c, g, t, unknown, or other
cccacgcgtccggctgtgaagcccatagccaagcctgccgcacctaagctgaagggggtgtcgaaaccaaagactgttgccccaaagccaaagactgctgctccggctaaggcggtgaagacatctgccaaaccttcccctgcaaagaaggcggctccggtggcttcgaagaaggctaagccggtgaagaaagcaacaactcccaagaaagcgaagaaatagatttatatctgctggcggggttgagttgataggtagcctgatgttttagtatggttattttgatgacaattgaagcacttcaaagcctgtcattttcttaatgacaatatttgattgcaaatttgatggttctcaaaanaaagaaatatttgggttat

SEQ ID NO: 4657 - DNA, 309 bp, Lilium asiatic
ggaacatatgttatcaacgacactttttatatcatgatccaaagcaccaatatgcgtggttgaaacagtggatgcagatcttactactgggacactgttctcttcgaccaactacttattgcgtaatagattttctctgaccctgactcggatctcttcggcagtaagagatcccgtgcagaactattcggttctggatggatttaatggtattttggttagcaatcgatgcgatacgagtctgtagatggattttaaggtttgtgtgagagtacatctgacagaattaatggtcgtgagtgtggaagg

SEQ ID NO: 4658 - DNA, 305 bp, Lilium asiatic
  modified_base (20)..(20): a, c, g, t, unknown, or other
gcgtccggttggtaacttgnttcttctctttctcaagtactctgaaattttaacttatcctgctcaagaactttttaaacttgactatgatttcatatgatagggcgcttttattacaaaaaaaaaaataaaaaaataaaataaaaataaaaatttaaataaaaaacaaaaactaatatattaaaatttacaaaatctaaaccattaaaatatccaaatattaataaaattacgctcccttaaaaatatcccaaactttacaatcccccttttattaaaaaaaaaaaaaatttatttttataaaa

SEQ ID NO: 4659 - DNA, 260 bp, Lilium asiatic
cccacgcgtccgctccaaatcccccaaactcgaaaccttaatcctctgctccaatggcccggacgaagcagaccgcccgcaagtccaccggcggcaaggcccctcgcaagcagctcgccaccaaggctgctcgcaagtcggctccgacgaccggcggagtgaagaagccccatcgctacaggcctggcacggtggcgcttcgtgagatccgcaagtaccagaagagcaccgagcttcttatcaagaagctgccgcttcag

SEQ ID NO: 4660 - DNA, 247 bp, Lilium asiatic
cccacgcgtccgcccacgcgtccgagtttttctcttagcattgttattagtccgacactcggagtagcattcttacaagaatcaaaggctaagaaatgtggaatgtttgtgaaatatgaaattgtggtatacaagaaatttaacattttacatataaaacaaacctcagagtatcacctgtccgcaatcaagtacataaaatgtgagattattaaaacaaaaaaaacaaaaaacttattataaagaa

SEQ ID NO: 4661 - DNA, 293 bp, Lilium asiatic
tcccactcctcctctcaattttcccaaaacttctatcatcaatcctattattcattctctcatactatttttatcacactaatgaccacctaaaatatgtcccatctcaatcaaatatcaaccttatgctattcacaaaacttatccttctacatataaatcaaacaatccacattcatacattcctatcacagtacatcttatttagaacttttaataccataatatcacctatcttcttatcataaatctttcctttcataaccatttttaatttaaatttcacatcattt

SEQ ID NO: 4662 - DNA, 122 bp, Lilium asiatic
  modified_base (23)..(23): a, c, g, t, unknown, or other
  modified_base (30)..(30): a, c, g, t, unknown, or other
ccgggccgaccgcacgcgtccgnccacccntcctctccaaatcccccaaacttcaaaccttaatcctctgctccaatggccaaggactaatcaaaccgtcctcaagtccaccggcggcaagg

SEQ ID NO: 4663 - DNA, 260 bp, Lilium asiatic
gttggtaacttggttctgctctttctcaagtactctgaaattttgacttaagctgctcaggaactttttaaacttggctatcatttgatatgatagggcgcttttattacaaaaaaaaaaaaaaaaaaaacaaaaaaaaaaaaaaaaaaaaaaaaaaaaaaaaaaaaaaaaaaaaaaaaaagcctgggcgggcgatctaaaaagaaaaaaaactaaaaaacgggggggcccctctaaagaacccaagtttacggccccct

SEQ ID NO: 4664 - DNA, 328 bp, Lilium asiatic
cggacgcgtgggcgagatcaaactagagaaagtgaatcaagagataaccggcgatcggagatggggaagacaccggtgcgcatgaaggcggtggtgtacgcgctgtcgccgttccagcagaaggtgatgccggggctgtggaaggacctacccggcaagatccatcacaaggtcagcgagaactggatcagcaccatccttttgctgggcccgctcgtcggcacctacagttatgtccagtggtacgaggagaaggagaagcaagcccataggtactgagattcatcctgtgtcggtcacaatgtggcatcctcgttggtaagctctg

SEQ ID NO: 4665 - DNA, 414 bp, Lilium asiatic
tgaaagagaagtttgagggtctgtgcaaggtcatcaaggaggtgcttggtgataaggttgagaaggttgtggtttctgaccgtgtggttgattctccttgctgtttggtcacgggtgagtatggatggacggccaacatggagaggattatgaaggcccaagcgctgagggactccagcatggctggttacatgtcaagcaagaagaccatggaaatcaacccggagaactccatcatggaagagctgaggaagcgggctgatgctgacaagaacgacaagtcagtcaaggaccttgtgttgctgctgcttgagactgcactgctcacctctggtttcagcctcgatgagcccaacaccttcggcaacaggattcaccgcatgttgaagcttggcctcaacattgacgatgatg

SEQ ID NO: 4666 - DNA, 402 bp, Lilium asiatic
cgaaggcattaaaaaccctagggcgcatcgaattcatcgagccgccgtcctcaccaatccggaatcgatggcgtcgaagaggatcttgaaggagttgaaggacttgcagaaggacccccctacctcatgcagcgcatgccctgttgcggaggatatgtttcattggcaggcaaccattatggggcctgcagatagcccgtttgctggtggcgtgtttctagtgactattcactttcccccagattatccatttaagcccccaaaggtgtccttccgcaccaaagtttttcatcccaatatcaacagcaatggaagcatctgccttgacatcctcaaagaacagtggagtcctgctctgaccatatctaaggtgctgctatcaatttgttctcttctgactga

SEQ ID NO: 4667 - DNA, 414 bp, Lilium asiatic
cccacgcgtccgctccctgcattcatcggtacaatgccacggctctcagctgtggacttacgaagacaaccggttcaccggcatgattccaacaacatacgcaatgcgggcggctgccccaacagtggcagagggaatggcgccgttcgggcggctgttgctgtcggggaactaccttttcgggccaataccgagtccgatgggagtattgaaggaggggtcagcgacggtgagtttggctgataattgtctgatgcggtgcccgactgtatacttcttctgtcagggcggcgagcagaagccgcaggcgacgtgccgggggtttaatccggtgatcccgtaatggtatttggttgtgtagtatgtatgtgaaatcttggtggtggatattgtctggtttggtcccgagtgtga

SEQ ID NO: 4668 - DNA, 306 bp, Lilium asiatic
gagaaaggagggagctccacgattgaagagagtgttcgtcgacgtgcctactactcgcaggggggatcagcagctaatgaaagcaatgcatttaggcggtaagttttccctttgcaacagtgtttgtataatttgtctgaagcagagttgatatgcatgtttcctcaagcattcgccgtgtatggttcatgtattacccgactgtggtggggatactttttactggttggatggcgtgtcagtagtgctgtgggggtattattaaaggaataggcttgatatataatatgttcataagttgcttcg

SEQ ID NO: 4669 - DNA, 348 bp, Lilium asiatic
cggggcgtggcaagggcggaaaggggctcggaaagggcggggcgaagcgtcaccgcaaggtcctccgcgacaacatccagggcatcaccaagccggccatccgccgcctcgcccgccgcggcggtgtgaagcgcatcagcggcctcatctatgaggagacccgcggggtgctgaagatcttcttggagaatgtcatccgtgacgccgtcacctacaccgagcacgcccgccggaagacggtcaccgccatggacgtcgtctacgcactcaagcgccagggacgcaccctctatggcttcggagggtaatctatctagggtttcggtggatgaactagaaatcaattct

SEQ ID NO: 4670 - DNA, 346 bp, Lilium asiatic
gattcctgtcagaggtgtcgccaaggcttcttctgctctgatcacggttctcaagccagggctttaaagccaacagtttcaatccacactgagacaactcctgttccagctccgaccccggctccggtcaagaagatagttgatcttaatgagattcagacatgcaggaacaagggatgtggcaagtccttcaaagaaaaggagaaccatgaaactgcttgcgagtaccatccagggccagctgttttccatgacaggatgcgagggtggaagtgttgcgatattcatgtgaaggagttcgacgaatgtatggagatacctccctgcacaaagggctggcacaatg

SEQ ID NO: 4671 - DNA, 409 bp, Lilium asiatic
gctgccctggtttcatatacaggcgttctctgtttctgggcacaactgacatgtcccgttgagatttccgttcatttattgagagcctttctgttaaatatcatggtgatacctatcacttgatagccaaaaattgcaatcattttactgatgaagtttgtaagcgtttgactggcaagcctattccaggatgggtgaatcggctagcaaaactagtttcaggttctttctgtaattgtctccttccacaaagtattcagatagcagcagtccgacatttaccagatcatccggtatactcggatgacgacgggtcggagtcgtttggttcagttgaagagagcgaagaggatgaacctgatcaccacctgctaacgattcagaacagcgacattgtgcactcgagaga

SEQ ID NO: 4672 - DNA, 337 bp, Lilium asiatic
cggacgcgtgggcggacgcgtggggtctcaatccgtcagctaggaccttccatgattcagcagatgcagcacccttgcaatgagtgcaagggcactggagaaagtatcaatgataaagaccgctgcccgcagtgcaagggtgagaaggttgttcaggaaaagaaagtcttggaggtgcatgttgaaaagggtatgcagaatggccagaagataaccttccctggagaggctgatgaagcgcctgattgcgtcactggcgatattgtgtttgtcctccaacaaaaagatcaccctaagttcaagagaaagggtgatgatttgtttggtgaacacacac

SEQ ID NO: 4673 - DNA, 174 bp, Lilium asiatic
  modified_base (14)..(14): a, c, g, t, unknown, or other
ctctctctttctcnctctctttctatactttttaaacacacataacctttcattccacaagatatccttttcattttctgagcctacttcaaatctctttaccgcgtctttcataaataccactgttaaaaccccaccgttacccaacttattcaacatccaacacatcctccc

SEQ ID NO: 4674 - DNA, 177 bp, Lilium asiatic
gctgccctggtttcatatacaagcgttctttgtttctgggcacaactgacatgtcccgtgcagatttccgttcatttattgagagcctttctgttaaaatatcatggtgatacctatcacttgatagccaaaaattgcaatcattttacttatgaaagttgtaagcgtttgactggc

SEQ ID NO: 4675 - DNA, 240 bp, Lilium asiatic
gctgcccttgttccatatacaggcgtctttttcctttagctacgaccttccatgattgagcagatgcagcacccttgcaatgagtgctttctgtcaaatatcatggtcatacataaataccgctgtccgcagtgcaagggtgaaatactgatgaagtttgaaagcgtttgactggtaatcctttataatgatttgctaaatcggctagcaaaactagtttcaggatctttctgtaattgt

SEQ ID NO: 4676 - DNA, 296 bp, Lilium asiatic
  modified_base (262)..(262): a, c, g, t, unknown, or other
gggccactaaaatctagccaaagcagactactcttatatctcagaattgatgtcatccacgatcaagtattgggttcgcccccgggggttcattgatgtatggtagggggagctcattggtgtctgccgaacacatgaatgaaccaccccccccccccccccgaaagaatgtttgagtctcgaggtccctctgttaggagactcacatcatatttcgcactttcgaacatttgctcagactgaatgtgcaatgggacgcgcnatggtatgggtagaggaggagataatgaatctct

SEQ ID NO: 4677 - DNA, 250 bp, Lilium asiatic
  modified_base (173)..(173): a, c, g, t, unknown, or other
cccactcctccgtacacctttaacttacagtttttacgactgcattgaatacatccaaaaggagtgaatctctagaggtcacgcccaacagtatccgcatgtagcaagaacccaaagttcgcaaagaaaggcagaagatcacgaactataaaagctgctgtgccatacatccnttaatgcttgctggcccatttgagatatcagatgttactagactaccctatcacgctgctgcatcacttcaacactc

SEQ ID NO: 4678 - DNA, 283 bp, Lilium asiatic
attgaaaaataaatatgaaagttctacatcttttcaaaaaaaaaaaaaaaaaaactaaaagaaaatatttcaaaaaaaaaaaaaaaaaaaaacaactaaatataaaaattattaaaacggtcctcccctctatagaaaccaatcttacttacccttcctttcaactccatatctctattatatgctcccctaatttcaattaactgaccctcatttaacaactttcttcctttgaaaaaccctgtcattacccaacttaatcccctttatataaatccccctt

SEQ ID NO: 4679 - DNA, 331 bp, Lilium asiatic
cccacgcgtccgacccaacggaactaatcgaaccctagagagagatgagctcgccgtcggcgctgcttcgtacgatctcgctgctcctgaggttgcctgcctatggagtcggctgcgggatcaggaaagcggctgcccgctacccggatttccgacaatggatcatcgatttagagatgaagacgccgaatactaccgaatccagcacaattaactgtgccgcctccgaggccagccatggtgccgttggtactgagacactaccttcgactgaggaatttcttcaaactgcttctcattttttcggcaaagtcattgtctattcggcttt

SEQ ID NO: 4680 - DNA, 256 bp, Lilium asiatic
gatagcgcaaggaaggagattggtctgtggttccctgaaggcatcgccgagtggcagagcggctcccacccctggatttatgagcactgagttgtattgtagcccatccaggatttctgagtgaattagtttgatgttgcagtccctttttagactatttggggtactattatgggtgtggtcctttatatccctatattatcttctgatgcatatgttgcaaactggtttatgctgatgtcttttttttccctcc

SEQ ID NO: 4681 - DNA, 173 bp, Lilium asiatic
  modified_base (110)..(112): a, c, g, t, unknown, or other
cccactcttcctacccaacggaactaatctaaccctaaagagagatgagctcgccgtcaggactgcttcgtacgatctcgctgctcctgaggttgcctgcctatggattnnntttgcggaatcaggaaagcggttgcccgctacccggatttccgacaatggatcatcgattt

SEQ ID NO: 4682 - DNA, 212 bp, Lilium asiatic
gaaggatcaacttatccggacaaaaaaaaataaaaaaaaaaaaaaaaaaaaaaaaaaaaagggaaaaaaaaaaaaaaaaaaaaaaacacaaacatacaaaaagggcggccgttctatcggttcaaatcttacaaactcactcacccgacctattaacctttttatagtgctacctaaatgccattacctggctcactgtccacaccgttcat

SEQ ID NO: 4683 - DNA, 417 bp, Lilium asiatic
cccacgcgtccgccgagtcctcagtttacagaggagaagagatggacgctgccaagacgaccaagggcgctgctgggcggaagggtggtgccaagaagaagtcagtcccgaagtccgtcaaagccggcctccaattccctgtcggccgcatcgcccgctacctcaagaagggtcgctatgcaaagcgtgttgggtctggagctccagtctaccttgctgcggttctcgagtacctcgctgctgaggtgctggaactggccggcaatgctgctaaggataacaagaagtcccggatcatccccaggcatgtgtgtttggctgtgaggaatgaccaggagttgggcaagttgcttgctggagtgacgattgcccatgggggtgttattcccaacattaaccctgtccttgcttccaaga

SEQ ID NO: 4684 - DNA, 209 bp, Lilium asiatic
cgaaccaacttaaggagttgaggagaggccttctttgatatttttctattaaagcttaatagcaggaggtctgtgggtgtgtcttctcatatctaattcagaacaggccgcttcttcaatgtcattcaacgcagaggaggttttcactcattccaatttatctctctctaaaatcaaatatgaacatttttgcccttcatgccttgatt

SEQ ID NO: 4685 - DNA, 386 bp, Lilium asiatic
ctctaatctccactcccttctccgatggcccgcaccaagcagactgctcgcaagtccaccggcggcaaggccccccggaagcaactggcaaccaaggcggcccgcaagtccgcccctgccaccggcggcgtgaagaagccccatcgcttccgccccggcactgtggcgctccgtgagatccggaagtaccagaagagcactgagttgttgatccgcaagctccccttccagcgcctcgtccgtgagattgctcaggacttcaaggccgacctccgcttccagagctcggctgtggcggcgctgcaggaggcgtcggagtcttatctcgtgggtctgttcgaggacaccaacctctgcgcgattcatgcaaagagggtgactatcat

SEQ ID NO: 4686 - DNA, 409 bp, Lilium asiatic
agcagctttcagtcagaggacttggcaggcgggccagagtccctcctaagcaaagccggtgagattggaagaggcactttcggggtcatgtacaaagccaccataggcaacaacaggctagtagccatcaagaaattgcttgtcagtgttgctcacagtgacttcgatcgagatgtccagattctcgccaaggcgagacacccgaatctgatgccactcaaagggtactactggactcctcaccttcagctgttgatttcagactatgctccgaacggaagcttgcacacattgctccatggatcagccaagcctctgacatggtcgaatcgctttaggatagtgtccggaacagcccgatggcttgcacatctacaccagtcccggccaccgatcgtgcactacaatg

SEQ ID NO: 4687 - DNA, 360 bp, Lilium asiatic
gttgcttcccttttctaaagggatgtatggctgctctttgctgctgctgtatactggaggaatgctgcttttgatagccgctgcttcggatttgtggtgtcatcttcattagttattttgggtgttcagttggtgactgtgattgttctactactcctaaagtcgtgttaattctagtggcttggcatacattatatacttgtatgactcaaatgcttgaaggctacatagaataatgctgcagcgcggcaataaatgttgtgtcaccttgtatcttatctgtaaattgggaggcattgtagttcactactcctatccctcgtctatgtactcatttaatatattgcgtctcttcttgct

SEQ ID NO: 4688 - DNA, 181 bp, Lilium asiatic
atataatcaccttaccctttccaaaaaattttatcaaataaatactatataactattcctaagacattttttaaaatacttttaacctcactatcattatcctctctctaatcaacactttcatatccatcattaaatatcccctacattttcattcacattaactcttcaacaatataaa

SEQ ID NO: 4689 - DNA, 369 bp, Lilium asiatic
ctcaaaatcgagttcacatctcctccctcggacggtgggtcgccagtatggaagctcgacggctctgagcccaacggccaacgatatgtgacactaaacgggtctccgcataacgaaatcaacatggacaacatgttcaaaattgaaaaagttggtgtcatcggctacaaactgctatactgcccaagtgtagccggcgtccctgccgatggtccttgcggtagtctgggtatatacttcgaggatgggaaaaggtggttggttctgagcgaccagcccttcttggttgtctttgtcaaggcataaactctcgcagatatccctgttacgcacctcgactctcatgaaatacgtgctttatgaccgagt

SEQ ID NO: 4690 - DNA, 401 bp, Lilium asiatic
cccacgcgtccggcaggacattgcggtggcggagttggcgccgacgcatccgatccggttggggctggcgctgaacttctcggtgttttactatgagatcctgaactcgcctgatagggcttgcaccttggcgaagcaggccttcgacgaagcgatcgcagagctagatactcttggagaggagtcttacaaggatagcactctcattatgcagctcctccgtgacaacctcaccttgtggacctcagacatgcaggatgatggaggtgacgagattaaggacgcacataaacatgaggatgaacactagcaacttgaagaaatgacaggtgctgatctctgaagtattcctagattgaagtatgtctcatagatattcactcatttgatcatgtcataat

SEQ ID NO: 4691 - DNA, 410 bp, Lilium asiatic
gaagagtttatgttcactgtactgctggattggggagggcacctgcagttgcaattgcagatatgttttggttctctgacatggatctgaataaagcctacaagacgctcacatccaaacgtccttgtgggcccaacaagcgagcgattcaaggtgccacttacgatcttgctaagaatgatccttggaaagagccctttgagagcctgcccgagcatgctttcagtaatgtttccaattgggaaagggaactgatacgagatcgagttcgtcgacttcgcggaacttgagatttcatgaggcggctccagtcgaagaaagtcggattagcagcgcctgggaagctacaagctgaatggtagcaaagcttatttttgctgcagttctcttgtggaatgttatgctgggaa

SEQ ID NO: 4692 - DNA, 157 bp, Lilium asiatic
acccacgcgtccgaaaaaaaaaaaaaaaaataaaaaaaaaaattataaaaaaaaaaaaaaaaaaaaaaaacaaaagaatatttaaaataaactaacatccaaccctaataaaaacaacaaaactcttcctatataacaaccacattatcccatcctg

SEQ ID NO: 4693 - DNA, 393 bp, Lilium asiatic
gatgtctacattgaaaaaaggactgacagagtttttcaaggaaaagagaatgtggggttcaagagatcgactaactttcacttatgaatctttcatgctgactgttcttcctttccttgttgcatagacgagagatatctgattggtatgcttttaagaacattcctgcatcttgtgctcacgtaatgtgtatgttatagtttactttccgtgatgagtttctttgcaatgtagtcctccagtctttgtgcaatttcattttatgttctaaaaaatgcaaaccatgcggtatgtcttgagttctgtatcgaattgttggttctgaaataatccgtgatgagtttttttgcatatgtagcctccattctctgtgcgactcattttatgttctaa

SEQ ID NO: 4694 - DNA, 347 bp, Lilium asiatic
  modified_base (1)..(1): a, c, g, t, unknown, or other
nttgtttttttttttttgttctttatccaaatccaacatttcgcaaggagcgaatttgagggcctaaacatgaaaaccaatacatattgaaagcacagcggaaaagaagccctgaacatgagacccaagatcaagccctctcaccacggatcctcctggccagctggatgtccttcggcatgatagtcaccctctttgcatgaatcgcgcagaggttggtgtcctcgaacagacccacgagataagactccgacgccttctgcagcgccgccacagccgagctctggaagcggaggtcggccttgaagtcctgagcaatctcacggacgaggcgctggaaagggagc

SEQ ID NO: 4695 - DNA, 424 bp, Lilium asiatic
cccacgcgtccggtcgaagaaggcgacgtctaggagcagcaaggcggggcttcagttcccggtggggaggatcgctcgattcctcaaggccggcaagtacgccgagcgggtcggcgccggagctccggtgtacctcgccgccgtgctggagtatctcgccgctgaggttcttgagttagctgggaatgctgcaagggacaacaagaagaccaggatcgtcccaaggcacatccagcttgcagtgagaaatgatgaagaactctcgaagctgctggggactgttaccattgccaatggtggagtgatgcccaacatccacaaccttctgctgcccaagaaggctggtggctccaaggctgcggctgctgatgaggaggcctaagagttccgtggacttatgtgtagattagtttgagagtggggg

SEQ ID NO: 4696 - DNA, 216 bp, Lilium asiatic
  modified_base (1)..(1): a, c, g, t, unknown, or other
nccatccctcttttatattacttaaaccaatactaacattaccccataactcccatttaagcccttcttctccgaaccattactcattcaaaccacatactcaaacaatcccttatcattatacccaatatacatcactttcaccctttaacctacattccatcttcttcttctttcttattataatcacccatatttacattaatcacaccaata

SEQ ID NO: 4697 - DNA, 399 bp, Lilium asiatic
cgccgccgccgccactgccgctcctctcaggcgccgttcaccccgtcgtcatgctgctatgactgctaggtgctccccaacgacatcgatctgctcaatcccccggccgacctcgagaagaggaggcacaagctcaagcgcctcgtgcagtctcccaactccttcttcatggatgtcaagtgtcaaggatgcttcaacataacgactgtgttcagccactcgcagactgtggttgtctgcggcaactgtcagactgtgctgtgccagcccaccggcggacgtgcaaagctcactgagggatgctctttcaggcggaagaacgattgagggtggtgggttgttgctacactctattaatgctatttgagtcaggttaaaacccgttggagggtttatgtc

SEQ ID NO: 4698 - DNA, 162 bp, Lilium asiatic
cccacgcgtccgcccacgcgtccgcccactcgtccgcggacgcgtgggaaaaaaaaaaagaaaaaaaaaaaaaaaaaaaaaaaaaaaaaaaaaaaaaaaaaaaaaaaaaaaaaaaaaaaaaaaaaaaaaaaacgggggggcgcgttaaaaaagaataaaata

SEQ ID NO: 4699 - DNA, 341 bp, Lilium asiatic
ctcgatacttctccgcactccgatcgatctcggccccgatagaattcctcgatcttcactcgccctagcggattctccgccgccgattgctccatcgagtcctttgaattctatcagtgacggcgatggtgatgatcattgggcctgcggaggtgaggtagagatgttcgtgagtcggccggctgtgcacccggtggaggcgccgcctctcgccgatgccgccgccgagcacccgccccggatgcggatgaaggacgtgcatggcatgccggggacgcctgggggacttgcgcttcggtttctgcagttcggttttgctgttgcggcgctgtcgatcatgg

SEQ ID NO: 4700 - DNA, 279 bp, Lilium asiatic
cacgcgcctgctctatggcggaccaatgatggtgcaagcgaggagacaccagactgtagaggggcaagaggcggaggatggacagcgacagcttttgtgagcaccatcacgcgatcgacatgactaaacgcaaccgcatatcatgcacgccttcatcatgctaaataaacgatctttcttgagggatccgtctataggtttaccttaaatgatgaagaggaaaagaggtggacgacaagagtcagctgatatggatgacatccagatctatctacccag

SEQ ID NO: 4701 - DNA, 232 bp, Lilium asiatic
  modified_base (63)..(63): a, c, g, t, unknown, or other
gtggtgagactctccctaactgccttgtagtaactctttgctttactctcttgttcatcagtngggatatgtatttagtttgctgaactatttggaatggaacttagctggtttaaaaaaaaaaaaaaaaaaaaaaaaaaaaaaaaaaaaaaaaggacgaaaaataaaaaaaaaacaaaacttacacacgcatacaaaaaaaaaaatattttttagatagagaaaaataaaa

SEQ ID NO: 4702 - DNA, 159 bp, Lilium asiatic
  modified_base (24)..(24): a, c, g, t, unknown, or other
acccacgcgtccgctctatactantccctactccaatcaatatttttctccctaaaatacctccatcttcactgaggcttcaacattttacgaaacccattcattcatccagtcctcttactcctaacaaccacggctatactcatcatcattaatcta

SEQ ID NO: 4703 - DNA, 117 bp, Lilium asiatic
ctcgatacttctcacttctcctattcatattgtccctaaaacaattcctaaaactccaatgaagctattatattcccaacagcctataactactttatatccttttccattctatta

SEQ ID NO: 4704 - DNA, 232 bp, Lilium asiatic
ccggccgacgcacgcgtgcgtcggtcttatccaagctccgataatttgtgtttcacataaaacgcacaaggcctagaagaagttcttgtcgtgaatagggcgaaaaccactattaagagcaacctcatgccaatgagaatatgtcaaccatgtttgatgtcttaagaaaaaagaaaagagtaatactggaaaacctgcaagtgaacaggccatctttttcacatatcatgtt

SEQ ID NO: 4705 - DNA, 365 bp, Lilium asiatic
cccactcgtccgcctccatacttgatatcgccgagtttctttcctcctgtgggcatgtgagacatcatgaagtgataagtgaaatgccgactaatgttgcacttgtcactttcagagattcacaagaagcacaacgtgcagttcttctggactcgacaaatgtgaatggaaagccagtcaagatcacgccatgtcaacctgcctttgatgatcatgtcgagttgaaggatgtaagaaatgctggtgatatcaagtatgctgtaagtgaggcactttccagatacaatttctttaggagctatcgtgggaaaccaagtacaaaagttgttatcaacaaggatgccgacaagactgctaatgagggc

SEQ ID NO: 4706 - DNA, 144 bp, Lilium asiatic
  modified_base (20)..(20): a, c, g, t, unknown, or other
gggggggggggggggcgttntttgtttacttgatatcttctagtttctttccccctcttttcatgttagacattatttaaagataagtgtaattcccactaactgttcacttgtcactttcaaagtttcacaataatcacaact

SEQ ID NO: 4707 - DNA, 332 bp, Lilium asiatic
gtaattatcaatgttgccattgggaacggtgagcttgcaataaaactggatatgtcgcagctctaaagggaaagagatgggtaatatctctccaggctctcatatgtgtatgcttataaatttgtatattgtactcatgcctgtgatcctgttaagcttagtgaggcattgcttgcaacaagattttgttgaactgagatatgcttgagcctatgatcactatgtgaggttaaataagttgggaataggtggctcttctattttattgctttatgcaaggaattgacattatgagaatttttaccatgttgcctatgagctttacacttctc

SEQ ID NO: 4708 - DNA, 60 bp, Lilium asiatic
cggactcttggtcggactcgtgggcggactcttgggcggacgcgtgggcggacgcgtggg

SEQ ID NO: 4709 - DNA, 232 bp, Lilium asiatic
tgtagtaagaggagtagttatgaaccctgtttaccatccccatgggggcggtgaagggagagctccgattggtagaaaaaaacccacaactccttggggttatcctgcgcttggaagaagaagtaggaaaaggaaaaaatatagtgatagctttattcttcgtcgccgtaaataaataagaatatagaaaactgaatttttagaatttgaaataatggtgatgggcgaacga

SEQ ID NO: 4710 - DNA, 217 bp, Lilium asiatic
agttatgatttgtgcgtaggtggtgtcaggtaaatttgtaattttgctttggtatatatagatatggtatttctttttctgagccaaaaaaaaaaaaaaaaaaaaaaaaaaaaaaaaaaaaaaaaaaaaaaaaaaaaaaaagagggccaaaaaaaaaaataaaaattaaaaaaaacaatgcaaaaaaaaaaaaaaatatattaaaataggggaataa

SEQ ID NO: 4711 - DNA, 213 bp, Lilium asiatic
cccacgcgtccgaaaaaaaaaaaaaaaaatttaaaaaaaaaaaaaaaaaaaaaaaaaatgagagaaaaaaaaaaaaaaaaaaagggcgaacggtctaaaggattaaagcttacattcttacgcatgcaagcttacaactctttaattgtgttacctagaaacatttatctggcccactgactacaactttatgactgggaaaaccaaaaacca

SEQ ID NO: 4712 - DNA, 240 bp, Lilium asiatic
  modified_base (10)..(10): a, c, g, t, unknown, or other
  modified_base (14)..(14): a, c, g, t, unknown, or other
ttaatatcanacgntactacatcaatgttcagtacagattctttacaattctccaccccactcaatcctcaatatcaacatctcattcttcattcatttatctaacttcctaaaaaatgcttcctacacattccttaaacacatcccttatttaagtcctacctcctaactttacccttagacaacttttccatatctctcatccttttttatattttaaataaatcacacttcttaaca

SEQ ID NO: 4713 - DNA, 172 bp, Lilium asiatic
cgaccgcacgcgtccgaatctctaattttccgattgttctaacattttaatttattatggtgcttatcataatacagacattttctacctctttttttgcccaacattataaaataccataatctatttccccttaattctaccaaaactactatataattcctttttaaaa

SEQ ID NO: 4714 - DNA, 424 bp, Lilium asiatic
  modified_base (7)..(7): a, c, g, t, unknown, or other
aaaaacngggccgaccgacgcgtccgcccacgcttccgctcacctcaacttttcttttctttctccctgaccacccgaccagctccgcctctttcccaactgctccggccctgcctccaagactcccagcaagcgcccaaccatcgcgccagtggtccctccacactggaccacctcccagagaagaagagcagcatgcatgcaatccaagccgtcaactccgagatcaacgctgccgagcttccttactctatctctccttgttttctttttggattaaatctggagcttacaaatataactctccgtgcaggaatggtggagattgcttacacgcgcgagccagagctatcaagggaggaagtgatcatgcatgcacgaaggcggagatggagggctctgatgatgtgaaagtacgaggagc

SEQ ID NO: 4715 - DNA, 343 bp, Lilium asiatic
gtcgcgatgcacatgttcgtcaaaaccctcaccggcaagaccatcaccctcgaggtcgagtcctctgacaccatcgacaacgtgaagactaagatccaggacaaggagggcatcccgccggatcagcagcgccttatcttcgccggcaagcagctcgaggacggccgcaccctcgccgactacaacatgcagaaggagtccaccctccacctcgtcctccgcctccgcggcggcgccaagaagcgcaagaagaagacctacaccaagccgaagaagattaagcataagaagaagaaggtgaagctcgccgtgctacagttctacaaggtggacgatgccggca

SEQ ID NO: 4716 - DNA, 360 bp, Lilium asiatic
cctgaacctgtgaagcgccaaactccttttcagggtgtaggaagaaccctagggatgcaatcttcttccggtcctgctgctgttcaacctaccgatactgctgctgccccggccccctatatcggcatctcactggatccttctttgcctctgacctcgatacagctgaggttagcagacggtactcgcatggtgggacgtttcaatatgcaccagacagtgggagatattcgggcgttcattgatgcgtcaaggcctgttgctgcaagaacctaccacttgcagactgtggggtggcctcctaagcaacttactaacttgtctcggacgatcgggcaactactcctcgcacattctgtt

SEQ ID NO: 4717 - DNA, 397 bp, Lilium asiatic
ccaatctggttccttatccccggatccacttcatgctttcgtcatatgcccccggggtatctgctgagaaggcttaccatgagcagctctctgttgctgagatcactaacagtgccttcgagccgtcttccatgatggccaagtgcgatcctcgccatggcaagtacatggcttgctgtctcatgtaccgtggtgatgtcgtgccgaaggatgtcaatgcagcagttgccaccatcaagacgaagcgaaccatccagtttgttgactggtgcccaaccggcttcaagtgtggcatcaactaccagccaccgactgttgttcctggtggtgatcttgcgaaggtgcagagagctgtttgcatgatctcaaactccaccagtgtggctgaagtgttctc

SEQ ID NO: 4718 - DNA, 389 bp, Lilium asiatic
  modified_base (13)..(13): a, c, g, t, unknown, or other
gccacgctttcangactgcagggtagacgacatctgacgcattctgcaccggccgatggagctctagaccacgccatatagccatgcagacccgctcatccttcacagcttcaaatgaggtaagattcaattacgattgtgtactaattacttatttcttcttataaacaggctgatctataaaagaccgatagatcaatggaagagacatcgagggattgagacatcgagagatctctggccagatcacagggggttgctcccctgggaaaggtgaagatcaagcttagggctgaggatcgtgagtgtgagattagagagatcttggaataagattggtacactgagagatttctgattcgagttctcatggggatgtacattcttct

SEQ ID NO: 4719 - DNA, 320 bp, Lilium asiatic
ctggaacctttctactgtcgctgctttttataaactgtgtcaagaaagaaagctcggggtatggggaatagctagctcataccgaagtccaatcccacataacacttggacaacccccttgctggaattctctgcatctccctgcaaccatgggagcagtgttgagtgtcgcattgacataaaacaatctgattggcaaagcaaaagtagcgggatgcgtctataaaacttcaaaatttccgtccccgtccttacaaagcctatcgacatatacagggaacgtaacgataaatgcctgaccgtgaacactcacgaagatg

SEQ ID NO: 4720 - DNA, 399 bp, Lilium asiatic
cccacgcgtccggccaacaagaaggaaactgcagagagggagtatgaatactgcgtggaggtgatcagatggttagagtgcgaggggtacatggagaaggagttccgcgtgaagttcctcacatggttcagtctcaagtctacagcgcgagagaggagggtggtgagcgcattcatcgatgtgctgattgatgaaccagaatgcctcgtcgcacagctgattgatgctttcatggacggtatctgcaacaaggagaagcaagtcgaacagaaaggcatccaaacgaggctgtggcattaagcttttgcggatctagatccattgctcaatcaagattacactctccacatagcttggatgttgggatgcttctgttgctgctccaattcgtcagttatc

SEQ ID NO: 4721 - DNA, 387 bp, Lilium asiatic
cgaaatgaaagccttggagattgctgagaaagcaagagatgccattctcagtcgcgagttcgatcaggtgcgtgttaacataccgaatggagacatggtggggcatacaggggacatcgaagccaccgtcgtgagttgcaaggctgctgatgaagctgtcaagataattcttgatgccatagaacaagtgggtggtatctacgttgtcactgctgatcacggaaattgtgaggacatggtaaagaggaacaaaaccggccagccgcttctcgataaagctggcaacattcaaatgctcacttcccatacgcttcagccggtcccaatcgccatcggcggcccaagccttacacctggaaccaggttccgatctgatgttccaggcac

SEQ ID NO: 4722 - DNA, 373 bp, Lilium asiatic
catttccatcctagccagaacccaccgccaggtcctgcagatcctacggcccgtggtggctacacccagagagctgctggggagagggccgcacgcagccgccaggaaaatgggtatcatcagatgccgctgccccagaggcctccgtatatgtgagcagggcatcgctgctgtctgagactcttttgtgctcaaatttaaactaagaactgtttgttttcgcgctatgagattggagaacattggattgttaaaaagttctctgatgcacaacctttcctgtgggggcttgggctgtatagtgctttggccttggccctggatgggttgctatgtataagtccaaacataagactatttgggtctgttattt

SEQ ID NO: 4723 - DNA, 229 bp, Lilium asiatic
ccttatcatactatccagaacccatttttttaacctcaaaatccaacctccttctgtggctttttcttaacaacatctccataaattaccgtactcacacctcatcattaaatgacttatcttctacctattccccaaacttcctcatttatgttaccaattcaactctactttttaaaactctcctttcctcaaatataaactaataaccaatttttttctcactatt

SEQ ID NO: 4724 - DNA, 245 bp, Lilium asiatic
gctgatcaatggtggtagctgctggtatctcggatgcaaagggcaaactgtttctgtgggatggtcttaagcaactcctgtgtgatttctgtactaacggctgatcattaaattattttcgttcatcatattggataacttggtttatcaggtgtactattggagttaaactatgatatatatacattttatcatggattgatggttccgaaatttctagctatgtcggtgctggtattattttg

SEQ ID NO: 4725 - DNA, 365 bp, Lilium asiatic
aaaaagggcggggccaacccttccggcaaaacctttgaaattattccacttttgattattttaaagcttaaaatgcctttggctattttaaaatgcacatgatccttccaaaaattatttgaaaaactttcaaattgttacataatggaaaaacagtttcaccatcctatattgagttggatggcttttaaaaggcaaaatgtaacaatatggtaaaagatgtttctgtctatacccatgaattgccattgatgaaatcgacatcttaaattgaattgattaaacagtcaacatcaataacatgttaatcttttttacaaactatgtttctttctaagacactttccaaaaaaaattaactatct

SEQ ID NO: 4726 - DNA, 396 bp, Lilium asiatic
cggacgcgtggggaaacaagttcaatacccagctgtccaaggaacaggttggcgacttgtgtaagatttttacaggtgacaataagtcaccaaaggagaagcctgttactggaacgggtaaagtggtgaaatctgctggccgtgataggactgggaaagcaccaaattctgctggccgtgataggaccgggaaagcaccaaattctgctggccgtgacaggattgcaaaggcaccatattctgctggccgtgacagggctagaaggccccctccccgaagttatcagcggccagccccatattatccaagaggcctttcttatccagcaagggattcttatgtagaaccactcaggcctgttgcacagtatcacctaccggctcctgttccgtatg

SEQ ID NO: 4727 - DNA, 350 bp, Lilium asiatic
  modified_base (95)..(95): a, c, g, t, unknown, or other
gaaaaaaaccggacccacgcgtccggtacacatcttaaacaccttcaatttttacctatccaaacaacatcttgccctctgtcggtattattttnacacttgaccacctatcaccaaattacaaactcttttcttaaacatttataacttttaaaactcttaatccttttaagtttatcaacctttcaaatactcctctcccttataataccgataaagcaccaaatttcttctctcctttacactattaccaaggcaccatattctttttcccattacactcctattaaaccccctccttaaacttattaacgtttctcgctcatattatttcataaagctcttttata

SEQ ID NO: 4728 - DNA, 205 bp, Lilium asiatic
  modified_base (19)..(19): a, c, g, t, unknown, or other
  modified_base (28)..(29): a, c, g, t, unknown, or other
aagacagctacaccatcgnatatggagnnggagggctttcagagggcaaaatgtaacaatagggtaaaggatgtttcggtctatacccatgaattgcgatggaggaagtcgacatctgaaattgagttgatgagacagtcagcatcaatagcatgtcagtctcttttacaaactatgttgctttcgaggacatctccagaagaag

SEQ ID NO: 4729 - DNA, 261 bp, Lilium asiatic
ctcgactaaagatcatccttggagtcaaggtttgctacttttttttctcttcatgaatcgggtcacggagctgattcatgttggtcacaagtttgtgatgcttattgtatttgaacatttgatattagatatacacttactttggtatacactctatattgtcctttagcttgtctgtaagtcaatctcgagcaacaaaccgtacaaattggagttatctatcctattagacactttgatatctcaagagacttatttctt

SEQ ID NO: 4730 - DNA, 399 bp, Lilium asiatic
cttttcattgcaacgatcgagcaacaaactggaagcaaatattgatcaactctactggcggataagagatgagctaataaagcagatctccgagtttaaagaccagaataccaaacagatctccgagtttaaagaccagaataccaagcagatctgcgagtttaaagaccagaataccaaacagatctgcgagtttaaagaccagaataccaagcagatctctgagtttaaagacgagaataccaagctgatctcaaaactcgacagtgtgaagcagatctctgagtttaaagacgagaataccaagctgatctcaaaactcgacagtgacatacatgcaatgaaggctcagcttgaagttgcaaaaaatgattttatcaaatactgcatcggggctct

SEQ ID NO: 4731 - DNA, 380 bp, Lilium asiatic
ccacgcgtccgcggacgcgtgggcttgtgtatgatgttaccgatgagtcatctttgaataacataaggaactggattcggaacattgagcaacatgcctctgataatgtcaacaagattctggtgggcaacaaggctgacatggatgaaagcaaaagggcggtacctactgcaaaaggacaagctctggctgatgaatatggcatcaagttttttgagacaagtgcaaagacgaatctgaatgtggagcaggttttcttctccattgctagagatatcaagcaaagactttctgaagttgataccaaagctgaggatcggacactcaagattactccgactgatgggtctgctggtgacggcaaagctcctgagaagtct

SEQ ID NO: 4732 - DNA, 397 bp, Lilium asiatic
cggacgcgtgggtgcattctttctatttgcctaacaagatctgttttatgccaggtgtaacaagcaagggtctagtgttcttcatcccttacgtgtttgttggaggaaattgctgcaaatgaatatctattaagtcgtcaccttcattattgtcaattaaagctttggatttgtaaatgagcattatggttcccaagcttttttaagtcgttagatatctccttttgttgttcattgttacaagtctgtcacaatttcaagacatcacatacttgatgatacaagcaatgccgaacatacgacctcgaatatgtgctaactgcattatgtatcctaatgaatgaagtctttgcgtgtgccatctcatgttaaaagttggaggcttccttttaacttt

SEQ ID NO: 4733 - DNA, 393 bp, Lilium asiatic
ctagggttttatcatccccagcaagctcttcgattcctctcgaagggcctcttagttgccgtctctcccaaccatggcgaccactcagaaggccatgagcaagaagcgcaagttcgttgccgatggcgtattctttgccgaattgaatgaagtcctcaccagggagctcgccgaggatggttactccggcgtggaggtgcgcgtcacgccgatgcgtaccgagatcatcatcagggccaccaggactcagaacgtcctcggtgagagggggcggcggattcgggagctgacctcggtcatccagaagaggttcaaatttcccgagaacgcaagtgagctgtatgctgagaaggtgaacaaccgtgggctctgtgccgtggctcaagctgagtc

SEQ ID NO: 4734 - DNA, 391 bp, Lilium asiatic
acgggatgttgggtttcttcgacttcccagataaggacggaggacagtgcgacctctggatagccatgtatgcatacattatctcgccggtcatgggtattgatagcaagggaggagatatgagacattgtttgagtttttaaaaaactttttcactctttggtccaagaaaattatctttttaagcaaataaatctgtatagaacaggtattttcccacttagaatttaaattttcttgatgttggtgggggctttcttctcttgtatttccttgatttgatttggggaactgattcctctcttatgcatgatgtgttctaagaattttttggacgacactccgaataaacgtttctctgggtttagctttaatttgaatattttgagtc

SEQ ID NO: 4735 - DNA, 399 bp, Lilium asiatic
cgacgagataaacagagtttaggttttctcgcttgaactaagatgggtcgtggagttagcagtggcggagggcaaagctctctggactacctttttggtggtggagaggctcccacaaagcccgctgctaaccctccagctgctgacaatgctgggactgttgataagtcctccggtgctccagctcctcttgacaacggcaagcaggttcctgctggcatacaaggaaacacagcaaggaatgcaaacaactactttagagctgatggccagaatactggcaacttcctaacggatcgtccttccaccaaggttcatgctgcacctggtggtggttcctcccttggctacctttttggtggcggtagcaactgatgggattactatgctgttttagaa

SEQ ID NO: 4736 - DNA, 275 bp, Lilium asiatic
gttatggcagctggtttagtttggtgtcatggttcgaacctttgtttggaggtataaattcacgataatggtctttgcttgattcacaaaaaaaaaaaaaaaaaaaaaaaaaaaaaaaaaaaaaaaaaaaaaaaaaaaaaaaaaaaaaaaaaaaaaaaacaaaaaaaaaaaatttctaaaataacaaatacaataaacaaacataaaaaaaaataatacaaaaatacaaaaaaaacacaattaagtggggggcccctttaaaaaaaaacaaattt

SEQ ID NO: 4737 - DNA, 399 bp, Lilium asiatic
cggacgcgtggcgaacattcaagatatttttaacaatttctttggaggtggtggtgcagcagaggaggaagaggaaaggattccaaaaggtgacgatgtgattatcgagttgcatgctacattagaagatttgtacatgggaggatcattaaaggtttggagggagaaaaatatcttaaagccagctcctggtaagagacgatgtaattgcagaaatgaggtccaccataggcaaattgctccaggaatgtttcagcaaatgacagaacaggtctgtgagcaatgtccaaatgtgaaatacgagcgagaaggctatttcataactgttgatattgagaagggaatgcaagatgggcaggaagttgtattttacgaggatggtgaacccaaaattgatgg

SEQ ID NO: 4738 - DNA, 399 bp, Lilium asiatic
ccacgcgtccgggctgatggaaatattgccagaaacagggagttgggtgttttaaaagaagaacttaatgcacttagtcagaccatacccaagatccgtgcagacaaagaaactatggctagggaacatatacagaagtgtctgaagctagaggcagagctccgtacccttgagcctctcaaggcagaactcgtgcatttaaaatccgaagcaaaggagctggatgcacaatgtcaagaactgtcatcgaaggctcagggtatgtcacaggatttgaaactgttacaggctgagaaccagcaaattcctactttgaaagctgatcttgatgctctaagtgaggaggtcatgctagccaggacggcttgcgagtatgaagggaaagttcattctagtttc

SEQ ID NO: 4739 - DNA, 383 bp, Lilium asiatic
  modified_base (10)..(10): a, c, g, t, unknown, or other
cccacgcgtncgcccatttcgctggccggaagcaagttacatcttgatcgtacagaaaaaaccaatcatcggcatatatggccctcagagctggtcgaccaactgggacggccttacccgtcgctccactgcagagcccaataatcagaaaatcagcatggtcaccggcaagtgatggatcttgccgctggactactttcagtttgagaataatgtgcgctgtttgttgtttggtttcagtttggaataatctccactgttgttcgaatttagttcggcaagtaccatggtgttgtagcagtaatatccccgtgtaatcgcagctttattttaatttgatcttattttcagaaaaaaaaaaaaaaaaaaaaaaaaccggcgga

SEQ ID NO: 4740 - DNA, 380 bp, Lilium asiatic
cccacgcgtccgttttgcccctcttgtttccctaaccctaagagatgaagggcgcggaatcgaagaccgacaccgctaaggtcaccaagaaggccgaagccaaggtggcaccgaagaggaaggcggcggagaagccgagcaaggcggccaagccggcgaagaaggggaaggccggcgttgaccccaacaaacccaagcgccccgccagtgccttcttcgtgttcatggaggagttcaggaaggagttcaaggagaagaaccccaacaacaaggccgtctctgctgtgagcaaggctgggggagacaagtggaaatcgatgtctgatgctgataaggcaccctatcaagctaaggccaacaagcgtaagactgagtacacc

SEQ ID NO: 4741 - DNA, 392 bp, Lilium asiatic
cagctcgccaccaaggctgctcgcatgtcggctccgacgactggtggagtgaagaagccccatcgctacaggcctggcacggtggcgctgcgtgagatccgcaagtaccagaagagcactgagcttctcatcaggaagctgccgtttcagaggctggtgagggagattgcgcaggatttcaagacggatctgcgtttccagagccacgctgtccttgctctccaggaggcggcggaggcgtatctggtgggtctgttcgaggatacgaacctgtgcgcgattcatgccaagcgcgtcaccatcatgccgaaggacatccagcttgctcgccgcatacgtggcgagcgtgcttagatatgttcgctatcttgaccttttagttctgtgcatgt

SEQ ID NO: 4742 - DNA, 204 bp, Lilium asiatic
gaaaaaccccggcgacccacgcgtcctaagatacacactaaccccacccattgtttcaccctaaagaacacattctgaattttgcgttttctataaaaaacttgcccctctacaaaaaccatgtgtcgatacgccataaaaaatgtactcattaataccaaacttcattcttgtgtaatgcttttcccctccaatgctaattac

SEQ ID NO: 4743 - DNA, 383 bp, Lilium asiatic
tgtagctttctcttctttggtaacgatgtcttcttgctgtggtggaaagtgtggctgcgggtcttcctgcaagtgtggcagtggatgcaatggatgtggtatgtatcctgacttggctgaggggagcactgcctctaccactatgatcatggggtttgctcctgccaagggggagtttgaggggtttgagatgtatgctgagaatggtggctgtggctgcaagtgtggtgataactgcaactgcaacccctgcaagtgtggcaagtgatctctccatggagaagaggatgtagggtttgataccctttgtttacttgtttctgctgtagtgctgaataatggccatgggtttatatgatgcaagtctttttgcaccatgagtg

SEQ ID NO: 4744 - DNA, 390 bp, Lilium asiatic
caaaatgtcagaagtgtgggaagcgggcggttcgccaggcttaccacaacctctgcgacccatgtgcgaaggaacataatgtatgtgctaagtgttgctgtccgggaactccgattgtcggaagggatatctctgaggtggaggctgagcgcaaggctcttgatgaggcactccaaaattctcgggagagggatcgaagggcgcttctgcgtgcgatgaataagggcaagtcaagaaagacaacatctgggcctccaggtggagatcgaagtaaagagggagatatatttgcggctacatccattgacgagtatgtggaaactcccagacaagatgataggggtgaatgtgagggtggttgtataggcagttgaggcatggaaaacataa

SEQ ID NO: 4745 - DNA, 216 bp, Lilium asiatic
gtttcaggcactacgatcgaccagggtatcgcatacgtgctgatgctggtggcgctggtgctgacatacctgattcatccattggatgcatcgtcgccgtacaagttgttctgatatttacattgtagtagttgttgtgaagtttgtgtttgtatctggggtttggttgggttgtaactctgaagtttgtttttagatgatgagaaatttattctg

SEQ ID NO: 4746 - DNA, 399 bp, Lilium asiatic
gggaatttgattgatgcttgtgatcaaaggcaaaggaagtactgtgctcaattatcagaaacagcgttttctcaatccagaagaggcgttgatattgataggaagttgccaatgttccgatgccaggtcaaaccggatgccatcagggaaacctactgtcggtgcactgcctggttctttgccaccgcggagtagaagtttttggattgagaagagttccagtgagaaggctgtgagtgaaacaccgaggaagaggagtgtttgggttgagaagacgatgatggatcgaactgcaccaacacttccaatcgcggacaaccaaaagcgaatgaatagagaagagaagagaaggaatatgtgaaatatcttctgctggtttttctgaagggagaaacaaat

SEQ ID NO: 4747 - DNA, 286 bp, Lilium asiatic
aaaaaataaaaatattttaaaaaaatttaaaaaaaaaaaaaaataaaaaaaattttgggaaaatttatacaaaaaaacttatagaattttctaaatattcatacttacgtaaacaacattggggggccgtttttttggtttaagctttactttcacctcatggctttttgaaaagcctttttatatttttacttaaaagaatttaatgggccttttttttacaactatataagtgaaaaaactttggccttcttaactttaatggcttgggagccaatccttcttt

SEQ ID NO: 4748 - DNA, 254 bp, Lilium asiatic
agaaattgtggatctataaaagatcgggaagatcatccatccagatatgcgagatcacagggggttgtccccctgggagagttgaagatcaagattagagtttagattagggtgagattagagagatcttgtaatacgtgtgagttgtgagagatttctgattcgagttctcatgggatgtaatcttcttttcattctctgtgagcattgtaaggttttctgaactcatcttgatgtaataactcttttatatt

SEQ ID NO: 4749 - DNA, 392 bp, Lilium asiatic
cgcatagtgaaggatcgtggtacatcgatgaccatgctcaagaatgtttcagagggcaagtttaagcttattctcaaaccgatagctgatatatgcattaatgaggaacaaaaggaatacatagacttcgagtccttctacacacacacagtatgccatgagtgctgccatgggattggacctcataccataatacttccgtctggtcagcaatcaacagttcgcttggaacttcaagaattccactcgtatctagaagaagcgaaagcagacatcgttgggctttgggctttgagattcctgatttgccaaaagctactttcaaaatctttattgaaatctatgtacgtctcattcctagctggatggtttcgctccatacgctttggact

SEQ ID NO: 4750 - DNA, 397 bp, Lilium asiatic
cccacgcgtccgtgtcggcttttcttgcaaatacggagaagcataaggaaattgaggtgtgcgatgaggtgatctctgcttcgattaagaagatacatgagcatcggaggaggcgggcgttctttcttgggtttagccagtctccggttgagttcataaatgcgctgatttcgtcacagagcaaggatttgaagatggttgctggggaggcaagtcggaatgcggagagggagcgccgatctgatttctacaaccaaccatgggtcgaagatgctgttatacgctatctgaatcgcaaaccggcaggcggtaatgatggccctggaagcacatgatgcatctcttctgtttgggagaaggaaaccatgcatgtacagctcttatgtgattttcaaaa

SEQ ID NO: 4751 - DNA, 380 bp, Lilium asiatic
atttgctgctgtggctgatctgcttgtatctgaaagtttttgttggtgaaaatttcgtgctgattaattactggatgggtagatgtattgaattcggatgaataaattgtgtaaggtgatgctgtttttatgatgcatcattccaactaaactaaatatggagagatggaatttgatcatgcaacgaaaggtaaaaggcttacaaagatagttagtattcaaaaataactttagcctgcttgataggtctcggtttgaagatgatcttgttgaagtatgccatccaaacaactgcaacatcggattacttgcatactccccgttggccggtggaagtcttacagggaagtatttagatatcaactcatatgacgcaaaaa

SEQ ID NO: 4752 - DNA, 398 bp, Lilium asiatic
aagagactcactctccccacccatggctgcaccctagtgaacacattctgaatttcgaattgtctctttgaaagtggtcggttcaccgttgtcttgtgtggatagtccataaaatatgtactcattaataccaaacttgattgttgtgtagtgttttccccgtcggatgctaatgactgctgctatggaatttgaactcttccctatatgggaacattatcttctacctctggagtatcctcagtagaaaactctcgagtcagatgctccaccgacactgaacaccctgaccttctccctcgagctctatctcaatcatggtgcctacaacaggtaaccaagtcttatcaaatatcacgtctcctaataacgaaagactgcgattccggatgccatat

SEQ ID NO: 4753 - DNA, 390 bp, Lilium asiatic
  modified_base (10)..(10): a, c, g, t, unknown, or other
cccacgcgtncgcggacgcgtgggcggacgcgtgggctagggcttgcgaattcagggtccggtagggcgaaaatggggaggaagaagaagttgatgcagccgaaggaggacatcgcagaggatttctgcttcgtctgcaaggacggcggcctcctccaaatttgtgattacagagattgtcttaaagcttatcatcctcattgcgtgggcaatgatccgtcaattttggagacggagacagagtggaactgtcgttggcattcatgcttcatctgccacaaaggctcatcttaccggtgtctttgctgtcccatctctgcgtgtggacgctgtattaaatatgacgctgaatttgttccgatcaaaaagaagaaaaccggtctctgcaat

SEQ ID NO: 4754 - DNA, 401 bp, Lilium asiatic
cccacgcgtccgaaagatgtttctttatgaaatttatattcagtatatatatataggtaaataaaaataaacatgaaacttcccatattaaacatataatcacatagttgtactctctccggcaaatacaaaaaaacgtagataacaaacaattaatacatataaacttgagatcagaaacatgagcatcatcccaacaaacatcttgacatctgtaaaaacaattgacggacgcacaaccattagatgacggaactgcctgacggacatgaacttcacgacagctgaacgcacaccagcgactggaattaatatcaatgaaattttagcttgttccgatacaatttcctcagggaaacccaaatgggcaaatcaactcccacaaataataaattaaatat

SEQ ID NO: 4755 - DNA, 398 bp, Lilium asiatic
aagatagctcccgaaggcagtttcgcctggcaggacatttcagttgtgttgcttttgttggaagctcttggcttttgtatgcaaccagcaagagatggtcctagtcatactatggggaggactgtttcgaagggagcattgtctcccatcttatgattctaagtctcctacaaccatagagatgggagtccgaatggttgacctgagtctctcaggttgttattatgctggtcttgccagggtgggggctctgtattacctgacatgcattttgaggttgtgtttgttatcattattgttcgtcctttcgttgctaaccctatttcctttttgaaaaaacatctgctcgacctcatatttttttttctttcttttaaaataagttatagtagctaaat

SEQ ID NO: 4756 - DNA, 398 bp, Lilium asiatic
tgcagatattttaccaagggttttaatggaacagtacccggatttgccgtcaagactattgatacaactggagctggtgatgcctttgttggatcacttttagtatccattgccaaggacaattcgctttttgagaaagaggataagttgagggaggcgctcaagtttgccaatgcctgcggagcgatctgcacgatccagaaaggggctattccggccctcccaactacagcaatggcttcggagcttgtagctaagggtcattagacttctgcccaattcactcttatttatgttttggtttgcttgtctttctgagttttttttatttagtattttcgtttgaataaagtaactgtgaagggtttgtacggaagaatgctgtgaagggtttgtac

SEQ ID NO: 4757 - DNA, 323 bp, Lilium asiatic
gaagaacaggatcatacctcggcatattcagctggcggtgaggaatgatgaggagctgggccggctgctgcttggggtcaccattgctcatggtggtgtggtgccaaatattcattctgtgttgctgcccaagaagcaccaggacaagtctaagaagggggacgataagaatactgcttctcaggaattctagtttttctagagttattttagtatgtgtgaggatgaggatgaggatgtatcttgtgtttggtagagtatgcttactttagggttggagcaccatggaacaaagtggacttctcgttcaatgtttggagaat

SEQ ID NO: 4758 - DNA, 232 bp, Lilium asiatic
cccacgcttacgcggacgcctgtctttttaagtcagacaaacaaacacaaaaatggggaaaaataaaaaaaaataaaataaaaacattcactaactacaatataaaaaaacacattacttccatccattcttcaacataaaaaaacaactaataacttctaaaatcaataaaatttccactaattaacatgcactactactgaaaaaacctaaaaaaaatcgcaccttaatt

SEQ ID NO: 4759 - DNA, 96 bp, Lilium asiatic
ctcatcggtgttgacaaaaataacacatcatttacctccacctacagcaaaataccgcgttttttaattctacataatcctacctaacaataattt

SEQ ID NO: 4760 - DNA, 392 bp, Lilium asiatic
caagtttctagacaacaatgtcgatgggtatgatgaagccgctgaaggctggttgggaggagcagcccgatgctcaccgcattcggattactctttcttctaagaatgtgaagaacttagagaaagtctgtgctgatctcgttcgtggtggaaaagacaaggggttgagagtgaagggacctgttaggatgcctactaaagtcttgcatatcaccacaagaaagtctccatgtggagaaggtacaaatacctgggaccgctttgaactgcgagtgcacaagagggtgatcgacctggtcagctccccagacgttgtgaagcagatcacctcaataacaattgaacctggggtcgaggtggaggtcacgatttcagactcttagatgggtatt

SEQ ID NO: 4761 - DNA, 376 bp, Lilium asiatic
cggacgcgtgggtggcgctaaggggttcgacttcgcctcccgtagcgcagcctccgacatcggatctggatccggcaccggaggtggagacggaggcggagggtcgggagacggcggcgggaccggcgggaccggcggtggagacgggaacgatggggacgattggtccctcttgaagtggtatatgatgtgtctggatagtaatccggtgttaacgaagtctttaacaaccgcattgctgaatttgattggggatttaatttgccagcttttgatcgacaaggtgtcaaaattggacgtgaaacggacgtctatgtttactttttgggatttgtgctggtggccctacgttgcactttcgtacctatctttgagt

SEQ ID NO: 4762 - DNA, 398 bp, Lilium asiatic
caacctcaaagcccctctccctattgggccatggtctcactgatattgtgattcaggtccttcaaataaaatacaatgctgtcgggatttacctagagaaggaaatcacctcacatcttggtaaatggaagggcaagaaaggcgcagagctcgctgaggatgatctcttcttcgacgatattgtctcagctccggtggagaaaattttcaggattgtggtgataaaggagatcaagggctctcagtatggtgtgcagctggagagcgcggttagggatcggttggcggcggtcgataagtacaacgaggaggaggaagacgctctcgagaaggtcaccgagttcttccagacgaaatatttcaagaaagattctgtgatcaccatccatttccctgct

SEQ ID NO: 4763 - DNA, 396 bp, Lilium asiatic
cccatgttaatttgagaatctaccgtgaggattaggagatctcactccttcaatcggctctagtcaccgaaagatctttcagtatgacaatcatcattcccgatagctttattgagcccattctatcctttatctcaggtatgactctcaatttggaagttatttaataggtttgcttgatcttttcatgttgccagtgaggatgatctagaatgagcgggaagatagatcaagtatgcaggagttctttgggagtattaggaacatctgtgaaggagctgcagtggcttttatagagcagcgttccttgggaagcaagaatatctgggaatgcaaggaacttcagagtcaagtatctgcattgaagccaattccttggcaacaaaggatactatg

SEQ ID NO: 4764 - DNA, 401 bp, Lilium asiatic
gcactagattcactttttcttctcagacaggcctgggcagcatgcccggctgaagtgtctaaagctcaatctctcgctgcatcagatgctattccgttactgcagtatttgattcagtcagggccgcctaggttccaggaaaagtctgaacttcttttgcagtgtcttccagggacgcttactgttacaataaaacgtggcaataatttgaagcaatcggggggaaatcccagtgcttattgcaagctaacactcggcaatactcctcctaggctaactaagattgtatcgactggtccgacacccgaatgggacgaagcctttgcatgggctttcgactgccccccaagaagccagaagcttaacatatcctgcaagaacaagagcaaattcggaaaggg

SEQ ID NO: 4765 - DNA, 379 bp, Lilium asiatic
cccacgcgtccgcccacgcgtccgcaagaaattataattcttgggtacttcactcggataaataaatgttgaagatacctagagaaacatgatagaagaataataagtataaagaataagtatattacagtcttaaataattaaagaagtagattacaaactagaaaatgaaaacaaaaataaaaaaactaaaattagcatttataaaaaagcaataaaaaaattaaagctaaatatatataatatccaaattataatgataatctaacatagaaaaatatgttaatgtttattaaatctttagtattgtacgacttttattcttgttttaattttattgtactattttattgagaattgatgtaaacttgaattcatc

SEQ ID NO: 4766 - DNA, 397 bp, Lilium asiatic
caggtatgtaccatgctatagcaagcatttcagtttgtttagtttttgaatatgtcttgtaatgcgtggaagcttgctacatatgttgtgtaagtatacgtatttaccagatgatatgcacaatgttgatcaattcacttgcactcctgcgccgccgctgtccgtccccgcttccgctccaaaatgggtatctcacgagactcgatgcacaagcgccgcgccaccggcggcaagaagaaggcgtggaggaagaagcgaaagtacgagctgggccggcagccggcgaatacgaagctgtcgagcaacaagacggtgcggagggtccgggttcgcggcggcaacgtcaagtggcgcgcgctccgtctcgacaccggtaacttctcgtgggggagcgagg

SEQ ID NO: 4767 - DNA, 270 bp, Lilium asiatic
  modified_base (7)..(8): a, c, g, t, unknown, or other
ggaaaannggggcgacccacgcgttcgcatgtatttaccatgctataccaagttttttactttgattacttactgaatatggcgtgtaattcattgaatcttgctccatatctatcgtaattatacctatttaccagatgataatcactatattacatcaattcactattacatcgatgcaccgtccctattcgtacccgctttctttcctaaatgggtatctcacgagactcgatgcacaagcgccgcgccattaaagctaaatatata

SEQ ID NO: 4768 - DNA, 358 bp, Lilium asiatic
gcagataaaggtaatccaacctcacttgtttggttatgaatctaatattgttaaattcaatgttaacacatggtggattgattctagaacaacaatcaatattacgaattccttgcagggtttgcgaaacctaaggaagccgatgggaagtgagcaaagcatcttatcaggaaataagatgggctcgcatgtggaagctattggaacttgtatttttattttaagtagtggttttgttttaaagttagaaataaccttttatgttccaagtttttctagaaacttgatttcagtttcaaggcttgtacccattggatattcctttaataattcagatttatcattcaattttttttat

SEQ ID NO: 4769 - DNA, 398 bp, Lilium asiatic
  modified_base (347)..(347): a, c, g, t, unknown, or other
aaaggatcaaagctcaagaaggaaaagagatgttgcaagcttgatgaggatgtgctctcggatctataagtacccctcctcccccattggattgaggtaagaggtctcactccggcccgagtgggggagggcacattgttggccgtctttctctcggttttggaggaggcacattgggagagcatctacaagtgatttcggagtggagagttcatcatggttcttgtttgtgggtctttgttgagctttgagagagtcatgtaagtggagtttgtaaggtttgagtcttattttataatgagtttttggttcggatttgtatacattcaaggatggccaaggcctanaatgggatttgagttcttgtgttgatcttccattgtagttgatttaaactt

SEQ ID NO: 4770 - DNA, 390 bp, Lilium asiatic
  modified_base (11)..(11): a, c, g, t, unknown, or other
  modified_base (300)..(300): a, c, g, t, unknown, or other
ggtattttcgnataatttttttggatagtttgattgggtgaattctttggaaattctgatgggagctacatggaatagggtgcggtggactgtatcagttcagatacactcgcatgtataagagatgcaggcatatatttttctgtccctttctgtctgtgattaaatcaagatgtgtgtgcgcatcatctgttcatgcgtgcacattttggcaataattaaaatgaatgccaatgtgcgtgcaagtttcaggaatgtacacgcacaagcagtgtatgtgcgcacattctactatgtcgntgaatatttgtgatttccgattctctaaccggattcagttggttttctcaattcatatgtgatgacggattgtttgagagtttagtatta

SEQ ID NO: 4771 - DNA, 373 bp, Lilium asiatic
cggactcgtggggaaggacaccctgataagctctgcgatcagatctccgatgctgggcttgttgcctgccttgaacaggaccctgacagcaaagtggcctgtgagacctgcaccaagaccaacatggtgatggtctttggggagattactactaaagcaaatatctactatgagaagatcgtccgggacacttgccgcaaaattggatttatctccgatgatgttggtctggatgctgaccattgcaaggtgcttgttaacatagagcagcagtctcctgacattgccctaggtgtgcatggccactttactaagcgcccggaggagattggtgctggtgaccagggacacatgtttggatatgccacagatg

SEQ ID NO: 4772 - DNA, 290 bp, Lilium asiatic
gttcgatacaacctcctctactgcttcctgattattataaatggcgaaggatcccgtccgggttctcgtcaccgatacctgatggcaaatcgaatatgctatgggacctatgattgccacgggagagatgctgggtgctgatcaacctgttatcttgcacatgctggacatacccccagctgcagaatctctgaatggagataaaatggagttggttgatgcaacatttcctcttcttaaaggggttgtcgccaccaccgatgttattgagggctgtacgggagtcaata

SEQ ID NO: 4773 - DNA, 400 bp, Lilium asiatic
cccacgcgtccgccggaatggccttccgagttcctactgtggatgtctcacttgtcgatctcactgttaggctcgagaaggcagctacctatgatcagataaaggctgctatcaaggaggagtctgaggggaagctcaaaggaattttgggctatgttgatgaggacttggtttccactgatttcctcggtgatagcaggtcaagcatttttgatgccaaggctgggatcgctctgaatgataactttgtcaagctcgtgtcttggtatgacaacgaatggggttacagctcccgtgttgttgatctcatccgccacattagcaagtcttaaatggagtttgcctccatcgcgagtgcggctattatatctggtgtggtttggtgaagaataaaataact

SEQ ID NO: 4774 - DNA, 378 bp, Lilium asiatic
gagaaaaataaatttacaagtgctcaagtatccaacgccgataaacaacacaaatcaggagtttttaagaacttttgagttcaaatttcatccagaatccaagtactcaggcacacaaatccacacaatactacacaaaagagtagtttacaatttcctttgagatgaatgttcttccagaagcaatccacaaacacatttcctattcctttatccggtaatctcagagaatttttctcctccaaatttaagcctgtatcagcgagggtgatttttgatgaccggagatctgccgggtacggctttgtttcatttgctacagaggaggaagcagtggctgcctttactgaattagatgggcagagtttgatggggcga

SEQ ID NO: 4775 - DNA, 375 bp, Lilium asiatic
ctagattttcatataatgaaacctagattagataaattaacttcatcccattactataattgtgtaatataaaaaacaaagacactttgagaaaatatagatttatatttccttaaactttaactataaataattttaatttataaaaacatataaattactccatattttttcaaactacttaaataaatttgattgctccaaaattaataacgggattgttctaattctaaacttttatgcaactagaagatataatcaacaaaataaacttaattattatataaattgtggaactatcaatttttttccaaacataccttgaacatgactaaagaattattttccaattaaatataacttccttcataataa

SEQ ID NO: 4776 - DNA, 299 bp, Lilium asiatic
  modified_base (10)..(10): a, c, g, t, unknown, or other
cccacgcgtncgcggacgcgtgggcggacgcgtgggctgattatgtccgttatttggtgcatcaacatacaattcagctcgagcaacatgcaactgtcaaagttgctgccaatttagttagattattgtcataccagaacaagaatatgctggagactggtcttattgttggcggatgggacaagtacgaaggaggtcaaatttactcggtcccccttggagggacactcttgacgcaaccttttgcaattggaggatctgcttcgagttacttatacagattctttgatcaagcatgg

SEQ ID NO: 4777 - DNA, 284 bp, Lilium asiatic
cccaacgtccgattaaaaaaccttttatacatcaactgacgacatcccatttctgtagctatctgttaggctcgagaacgcacctacctataatcagataaaggctgctatcaaagagaaatctgtagggaaccttcaaagacatattcatataaattactaaatatttatataaactgattacctcgatgatagcacgtcaagcatttttgatgccaaggcttaaatcgatcttattgatcaccttaacaagatcttccatacgggtaactccaaaattattt

SEQ ID NO: 4778 - DNA, 289 bp, Lilium asiatic
aattacatgccagccttctcttccatgtagcgcgagagaggaagaaacaaagagagaaggatggtgctgaacagcgcgtgggtggcgacggtggctagggtttcagcggaggcgagccagtacatcgcctgcaaccccgagcggctcagcgccgagcaggtgctggatctcctctgctgccttcccctccaccaccttcgccgcctcgccgtccgcatcttctctttcttctggcttcccctcaccccggaccaacgccactacgcctactactattacaacctccaat

SEQ ID NO: 4779 - DNA, 53 bp, Lilium asiatic
aatacatgccatccttctcttccatttatttcgctttatcaagaaacaaacat

SEQ ID NO: 4780 - DNA, 260 bp, Lilium asiatic
gcctgttgtccctgagaagtatcttgacgagaagaccatcttccacctcaacccgtgaggccgctttgtgattggagggccccatggtgatgctgggctcactggccgcaagattattattgacacctatggtggctggggagctcatggtggcggtgccttctctggtaaggatcctactaaggtcgaccgtagtggtgcctacattgtgaggcaggcagctaagagtattgttgccaatggccttgctcgtcgctgca

SEQ ID NO: 4781 - DNA, 277 bp, Lilium asiatic
gcgagttgccagggttcgagttcttccccgatacgaaggctcgtgtgcttggtactaagtgagattacatgcctcccattctcaccacatagagttcttcgtgcggttttgttatctgttgttggtttactttttcgatcatttcgcctcccattgatagcaataaagggatgaaaaatgtatttgatgtgtaaaagacatagacactaattgtaataggcactttgtcgatggtgccatattacatgtattaagatgattgaggttttgtggggat

SEQ ID NO: 4782 - DNA, 339 bp, Lilium asiatic
  modified_base (334)..(334): a, c, g, t, unknown, or other
cttcttcctattttttattgttttattctcatattttctctatcatgtactctccttataggttcgggcccattttttcacttctaatattctctcccccgaaacattctcttattttctctcctctcattttcctttttttttctttttatctcatattttcttatggagagatcggagatgatgtgacccatagaataaaagtagggtggctcaagtggaggagtacgtctaacttattacgtgataaaatgataccaacaaaattgaaaggaaagttatatacgacaattgtaagacctgcattgctctctctatgggatagaatgttgtngcact

SEQ ID NO: 4783 - DNA, 367 bp, Lilium asiatic
  modified_base (308)..(308): a, c, g, t, unknown, or other
cccacgcgtccgagcagctctctgaggctcgatcgttgaacgatggcggagggaaagaagagcactctgaagagctccgatggtgaggaattcgaggtggaggagatagtggcgatggagtctcagacgatccgccacatgatcgaagacgattgcgccgagagcggcatccctctccccaacgtcaccgccaagatccttgccaaggtcatcgagtactgccgcaagcacgtcgagtccgccgccaagccctccaccaccgatgacaaggcgatcgaggacgagctcaaggcctgggacgctgattntgtcaaggttgaccagccgacgctcttcgatctcatccttgcagcaaactatctcaaca

SEQ ID NO: 4784 - DNA, 438 bp, Lilium asiatic
ggtggttatgctggtaagcttggggaggcctcaagtggtactcaacttgggtctaagctatgcggtgggaagttgacaaggaaaaatggagttggtgttagaagtagcttgagaagcgagcagagtgcgaaggataatgaagatgagaaagccaccagtggcgaatcaagtgagaatctggactctggtgaagctggagacaatgctattacctactgaggaacataactgatcctagtctgaacagggaaattatatgtgtggttgtttctgcagtttttatcgaagtgtgtgattggcagttacttttgtggtttgttgtgtaaattttccaaatcttaactcaagtgttggatcttgttggtttgtgcctatatctgtatttgaatctctcctattaaaaacctgctttcgcaatggtatctctttgattttgat

SEQ ID NO: 4785 - DNA, 329 bp, Lilium asiatic
gaaccatccagtttgttgactggtgcccaaccggcttcaagtgtggcatcaactatcagccgaccgactgttgttcctggtggtgatcttgcgaaggtgcagagagctgtttgcatgatctcaaactccaccagtgtggctgaagtgttctctcgcattgatcataagttcgatctgatgtatgccaagcgtgcctttgtgcactggtatgttggtgagggtatggaggagggtgagttctctgaggcccgtgaggatcttgctgcgctggagaaggactatgaagaagtttggggcacagtctgccgagggagaggatggtgatgagg

SEQ ID NO: 4786 - DNA, 340 bp, Lilium asiatic
  modified_base (252)..(252): a, c, g, t, unknown, or other
  modified_base (307)..(307): a, c, g, t, unknown, or other
gttggagaggacttcccgggctttccaacaaatggtcgtttgactataaattcttccgagggcaggagatatgctctgctgaccacgggacatctttcctggaatttctgatccggaaatgtcgaagttgaggcgtatacttaggccgagaagactgagactgggccgaataaggtcgggatgaggcttgacatgcatattacatgttggcatgcatatttaggccgagatgacggtttgtactgaggcggngctgaccgaggtgagctctcagattttgcctgtctttgactatgcattgctggantttatgacgtggcgtgctctgctgatgtggaca

SEQ ID NO: 4787 - DNA, 116 bp, Lilium asiatic
aaacacctactctttactcccattccacttcattatattacctacattgattatgccctgaacgacaagtccgaaccatactcccaacactcggtcacctttaaacaggttcttct

SEQ ID NO: 4788 - DNA, 351 bp, Lilium asiatic
  modified_base (3)..(4): a, c, g, t, unknown, or other
  modified_base (48)..(49): a, c, g, t, unknown, or other
  modified_base (98)..(99): a, c, g, t, unknown, or other
  modified_base (117)..(117): a, c, g, t, unknown, or other
  modified_base (131)..(131): a, c, g, t, unknown, or other
cgnntccgcgtccaatggcaatggggagctagggctaagaattcttannagtgtctcgattgggatccacatccgtaccaagggcattgatgcctgcnngcgtcgaactccgagtcntttaacgccgagtnaaacctaataaaataacatattataattttcctcgtcaagccaagcgggaaggatctctcaagctaccgtgttgtgttaaagggttatttttcattaaaaggaatactagcgttaatctttaggaatattcaaaaataaaaagtgaatgctaataatagttctccattccaccacgacctactggtgaaggtgaagatttttaccttttttcagagcgct

SEQ ID NO: 4789 - DNA, 357 bp, Lilium asiatic
ccaatccccagtcctcaatccctttcaaatccatctgatggcgccgaaatccgagaagaagcccgcggagaagaagccggtggcggagaagcccgccgccgaggaggagaagaagtcagccccggcagcggcagcggcggagaagaagccggccgaaaagaagcccaaggctgggaagaaggtcccggcctccaagggcaaggagggggagaagaagaagaagaggtcgaagaagtcggtggagacctacaagatctacatattcaaggtgttgaagcaggtccaccctgacatcgggatctccagcaaggccatggggatcatgaacagcttcatcaacgacctcttcgagaagat

SEQ ID NO: 4790 - DNA, 297 bp, Lilium asiatic
aaaaaagatggcaccctaggttgttttatcgcccctggactgaaaccatccacccgggtggtcgagaaaacacaaggggtgaacggcctgccgtccttggcaaggaacaactttgcttttatggtttcggccagcggggtcaagaacatcaaaactgccaccccttacggtactggaagaggaatgagcttgtaaaacggtctatatgcatctggaagaaaggctaagcggaagggtgtttatcaatttagccacaaatatggtgctcacgtcgacggttacagtccaatttatacc

SEQ ID NO: 4791 - DNA, 226 bp, Lilium asiatic
gtggaagaaacgactgaagctcctgagccagaagaaacagtggaagaagatactgaggagagaccagaaattaagcttgagacagcccctgctgatttccgtttcccgacaactaatcaaacaaggcattgctttactcgatatattgaatatcataggtgcgtagctgcaaaaggtgaggatgcttcagaatgtgaaaagttgccaagtactaccgttcgctctg

SEQ ID NO: 4792 - DNA, 304 bp, Lilium asiatic
acgcggacgcgtggtctgactcgtgggttgacttttgggcggacgcgtgggcggacgcgtgggagaaaaaaaaaaaaaataaaaataaaaaaaaaaaatgtagttaaatataaaaaaataaaaagataaaatatacgtaaattcaaaaaaatatatattatataatgtaaaataaattaaaatttggtggacgttttttaaaataaaatttaatggaaaaaccttggaattacctaatttttttaaattgcaaaaaattttaattttttttggcgtggcataataaagaagaggtcgggaaaaa

SEQ ID NO: 4793 - DNA, 384 bp, Lilium asiatic
  modified_base (342)..(342): a, c, g, t, unknown, or other
ggagtatctgacggctgaggtgctggagctggcggggaacgcgagcaaggatctaaaggtgaagcgcataacgccaaggcatctgcagctggcgatccgtggggatgaggagctggatacgctgatcaaggggactattgctgggggtggtgtgattccgcacatccataagtctctgatcaacaaatctgcgaaggagtgaactttggtgggtggatctagttgggtgtcttagttatgtgtaggtgtatctgtggttgtgtcctgtttctgttatgggttgttggttgttgcgtggtgtggatctgatgaattgtggtcgtttaatttgtatggagactnggtttaatggtgctagttggttaaaattgtgaattctcgagt

SEQ ID NO: 4794 - DNA, 342 bp, Lilium asiatic
cccacgcgtccggggactattgctggcggtggtgtgattccgcacatccataagtctctgatcaacaaatctgcgaaggagtgaactttggtgggtggatctagttgggtgtcttagttatgtgtaggtgtatctgtggttgtgtcctgtttctgttatgggttgttggttgtgttggatatgatgaattgtggtcgtttaatttgtatggagacttggtttaatggtgctagttggttaaaattgtgaattctggagtattgttgggtttagattggtactggtagttgatgtaatctgtggaaaaccatctgggttttgttgaatcaagtttatggagtg

SEQ ID NO: 4795 - DNA, 209 bp, Lilium asiatic
gttaaagaaaaaaaaactataaaaaaaaaaattaataataaaaaacataaataaaaaatatagggaagggatcttctaaaaaaaaaaacattctaacggtcccgcccatttaaagactcaattctttcttattctttcttccaactttttccctttccttttattttcacaccccttcagttaactaacccattttttttccccattta

SEQ ID NO: 4796 - DNA, 182 bp, Lilium asiatic
cctaaagaaaaaaaataaatatatccacatatatactttttctaccaaaaaaaaaacaatcaagacttttaaaaacttcacttaaactcaaaatctttaactttcaacaaataaaattccaaaattctttaacatattcccatcccaaattaattgtctaattatattaatatatttccttt

SEQ ID NO: 4797 - DNA, 295 bp, Lilium asiatic
cggacgcgtgggtgatgctggtcatatacctatcttccctcatacgcagcgtcatgggtctgacacaatttgattaacaacaaaatgttgaacaaggagcacgaaaaagccgaagatgctacacctgtggccattgcaactgctagtggaagctagatgatgtgattacttgttttgagatgatgtggagctgcaatgttaaacgatgtgatatcgcatcaatcttgattatcatcaccttggaattgttcgtctgtaggatttatttcatcttttacccctggtgttggagttt

SEQ ID NO: 4798 - DNA, 315 bp, Lilium asiatic
ccatcagttacatcgaccagtatgccaacctcaagacctccaatgccttgacctgcactggttcgatgagcacatcggacacccagctgtttctgaagttcggagaggtcatctcacagacaactgactgatatcaagatgttggagatggcttttctggtccattccgatattgttaggccaagaagggtaattcagacaggtttttgtgtcattgggtgttgtaagctgtagtagcaacggtttagatttgtgtatattggtgggaactccgggagggagcaaagtcttaaaatatatctccctagtttagat

SEQ ID NO: 4799 - DNA, 452 bp, Lilium asiatic
  modified_base (347)..(347): a, c, g, t, unknown, or other
cggggaagctggtccagatcgagcacgccctcaccgccgtcggctccggacaaacgtctctcggcatcaaagctgccaatggcgtcattatagcaactgagaagaaattgccttccattttggtggatgagacttcggtgcaaaagattcagcttatgacaacaaatattggagttgtttacagtggtatgggccctgattcacgtgttctagtgagaaaaagcagaaagcaagctgaacaatattatcgcctttataaagagccgattccagttacacaacttgtcagggaaactgctgctgttatgcaggagttcactcaatcccgtggtgtaaggccattcggngtttctctactggttgctggttatgacgataatggtccacagctttttcaaggtgatccaataggttcatacttttcatggaaggccctctgcatggggaaaaat

SEQ ID NO: 4800 - DNA, 353 bp, Lilium asiatic
cccacgcgtccggaacttctgaggaaggctgatgctggcgaggatggggtaaaactatcaccctggttcaggctggttgtggataacttcctgctaaaatggtgggaccatgtcgagactggcactctcctggaggttgctgacatgaaaaccatccataagctgtgacatgaaagctactgcttgtgttacttctgtctttggaggatttaaatggatgaattaggggtatgtttgctcttagaggaaactgattagcggattctggtatgatccatttggttgtgatgcctagttaccatggttttatggttgtgatgcttacttatcgtgtttaaaaccattatttgttc

SEQ ID NO: 4801 - DNA, 390 bp, Lilium asiatic
ccgctgttcttggagtcctttccgtcttctatccctacaagggcaaatccgtccccgagggtgctctgttcagcagtaccacattgcttgtattcttcattatctcattggttgtgactgctctagcagagggaatgatgatgtgggcaaccatcaccgaaggtctccaccgcactaacaacgtacaccacaacatggatgcagaatgcgccaccgccaagactggcctatttggtggcgctgccttcctcgcccttgacgctgccctcttctggctcatcgtccaaatgctgacgatgaatgcgagggctgattactcgtgtgaggatgacgaagacctcaagggcccttatgggcaggtgctcgccactgattatcagtcgaacagca

SEQ ID NO: 4802 - DNA, 228 bp, Lilium asiatic
agagggttcctccttcagttcctttaattatgttcctgtcacgaggacaatcccgagagggggcaacactgaacttgaatgctataaaccaaggtcccaacccatgtctcgttattttctcttatgcacgagctctccaaaactaggtacttaaaacatggcaaggacgcccattgaatattgatgcatcacatatatcactcttagagcgctctacatctaactccc

SEQ ID NO: 4803 - DNA, 330 bp, Lilium asiatic
gcgatcccaggatctggaggctctgaaacataaaattttggagaatggtactcctgctgatgggattagagtgtgtgatgtctgccaagttgtatgccccagccagattgtgttcaactctcatgtagccgggcagaaacatatcactttgctgcagctggttcagcagcagcagcttcagcagcagcaggagcttgttcagcagcagcagcagcagcagtagcagaatgctgtgggtgttaattaggttttgaagtggaagcaaatggttattagtatgttttatggatgttttcttctgagaactataaattctgacttactctcctg

SEQ ID NO: 4804 - DNA, 292 bp, Lilium asiatic
atataaaacaccgacaagcgctttaaatttagaaatctgctaaaagcccccttcatacgtgtgaccacaactctggataatacaatccaacattactattttcaacacttatccagccatgaacatctgttacaccctgccaccatattcagtatcttaactcactaaatcccattattattcattctcacagaattttctgtctttaccctttttttctcttaaaacaactacatttattttttttattagacacttcttcattatttttgttattttttttttttttttt

SEQ ID NO: 4805 - DNA, 318 bp, Lilium asiatic
cgccgaagggggtggtggaggtgcacgagatgctgtacgagactgctcaccacctaacccgtggcggggagaccggaattttcacgccgatgcatatgattctctgccggaagccggtggctgccgcagctgaggagtaggagctacattcacaaggtagatttgcagtagaattcattcaaactgagtactcggattaatttaccgtctcttgttttaattgcgtttatttatgtggtaatttgtcgcttaattatgttgtaataggatcagaacttcttgcctttcatttaacttttagtactagttttgattttg

SEQ ID NO: 4806 - DNA, 310 bp, Lilium asiatic
ctcagaaccctagttttcgaaacagctgagatggagaccggatccaaggccaagaagggcgccggcggacgcaagggcggtccaaaggctaaatcggtgagtcgttctgtaaaggccggacttcagtttcctgttggcaggattgggcggtacctcaagaagggtcgctatgctcagcgtgttggttcaggagctcctgtctaccttgctgccgtccttgagtatcttgctgctgaggtaattgttgaatttcttacggagtctctgccggatttggggttttcttgtgatgattcttatttgaattttg

SEQ ID NO: 4807 - DNA, 372 bp, Lilium asiatic
  modified_base (332)..(332): a, c, g, t, unknown, or other
gcgttcgctcacacatccaaatccttccaattctatttttctctcaaatctctaatcgctccgaggtggagaaaaatcccgcagagaacaaccctttcttataagcccttcttctaagaggagaataaatcttccccagccgagaataagccggctgtgaagaatcccaaggcttgcaagaagctcccgtcctccaaggaacggtataagaagaagaagacgtcgaagaagtctgttttatctactagatatacatcttcaaggtattgaagcaggtccacccctacattggaatctacagcaaggccatggggataatgaacagctttatnatttatttcttttttaatattgctcaagagtctgctcgtc

SEQ ID NO: 4808 - DNA, 312 bp, Lilium asiatic
atgtttactcccttaaaaaaaaaaatttaatttaaaaaaaaaaaaaaaaataaacaggagtgaataaaataaaataaaaaaattaaaaagtgcctccgctcttttaaatcatatcctctttccgccgccttccttctccttcccttttttttttctccttcaactaacatttactcttcttgccttctttcaccattcttaatttccctaaccttctttttaccccccttatttttctaataccctttctcctccttccttctgacgtattaaaaaataaccctttttccctttcccttttttccaattttt

SEQ ID NO: 4809 - DNA, 402 bp, Lilium asiatic
tttgctattctagaccgagagctgctcgatctagatgatctaaggacacgaacacatgcatgcgaaggaatatatctattatcaaggacactaaaatgaatgaactggacgacattgaaaacttgctgcactaagaaaacaattacaatgctgaagataatgagcatacaaagaatgcggatgtcaacaattgtctggataactatgactacaacatgaagaatactatcaaacatgacaagattgcttacaagctgtgtgatgctgacatgaagaagatcaatgatctcattgagcaagccatccactggcttgacaaccattacacttgccaagctgataactttgaatacaagatgaatgatttgtaggttatttgccaccctattattgttaacatat

SEQ ID NO: 4810 - DNA, 380 bp, Lilium asiatic
  modified_base (308)..(308): a, c, g, t, unknown, or other
agaaaaaattatatgcaagagcataaatgtgaaaccaaatcctaagaacagttcttgcactggttctgtattatgtattctctactagtgagtacccatgcgcttgaagccatggcctcacgagagaggtatctatgccggcggttatgtcgtgggcaatgaggatgaattcaacttagggctctcaaaaccttgttaatgcaaccatacataaagaataacacaaagatttgagagaaatgttttgtttatgaacataaatttaattcataatcatgaaccctttacaataactgggttctcttatntattagtctagagagatttgtaacaactacgactcctaattaaataacaacgaaacaacccttaagtcatct

SEQ ID NO: 4811 - DNA, 389 bp, Lilium asiatic
ctttgatattgatgcaaatggtatcttaaatgtgtcggctgaggacaagaccacagggcagaagaacaagataaccattaccaatgacaagggaaggctgagcaaggaggagattgagaagttggtgcaggaagcagagaagtacaaggctgaggatgaggagcataagaagaaggtggaggcgaaaaattctctggagaactatgcctacaacatgaggaataccatcaaagatgacaagattgcatccaagctgtctgctgctgacaagaagaagattgaggatgtgattgagcaagccatccagtggcttgacagcaatcagttggccgaagctgatgagtttgaagacaagatgaaggagttggaaggcatctgcaaccctatta

SEQ ID NO: 4812 - DNA, 225 bp, Lilium asiatic
cccacgcgtccggttctcgactttgtctttgggtggtcataggctctcaagagaaggcagaggcgcgagttcgcagtatgctgaatcttatttattgtgatcctggatcgattattgttgaatagatgtttgttgtgttttgattagcactttcggttaagtgaacgttgacatcaggctatcacccaattttcgcttggtaataatattttgatcgttttgtcc

SEQ ID NO: 4813 - DNA, 439 bp, Lilium asiatic
  modified_base (9)..(9): a, c, g, t, unknown, or other
  modified_base (287)..(287): a, c, g, t, unknown, or other
  modified_base (348)..(348): a, c, g, t, unknown, or other
ccacgcgtncgcttgtacctctccacaaccaaaaccctaacctcgccgatccttctcaccggcggcgatggaggcggtggagcaacttaagggcattctgaagatccagaaattccggcggggggtctcctacttgggcttctactgcttcagtgctctcatcacctacgcctacaccagcaatacgaccagggctggcatgtctcgcggcgaccagttctacgccgcctaccctgctggcactgagctactcactgacacagccaagctttataaggctgccctgngcaactgttttgaagtggaggaatggggaccaattgagtactgtatcatggcaaaacattntgagcgccaagggaaacctccatatgcatatcacgctcaatacatggcacaccttctttcccatggacaactcaatggaagcggatgaagc

SEQ ID NO: 4814 - DNA, 299 bp, Lilium asiatic
gccgaggccgcggcggtcctggcggacgcggcggcggtcggggtggacgaggcggggggatgaagggcggcagcaaggtcatcgtcattccccacgagcgacacgaaggtgtgttcatctcgaaggggaaggaggacgcgctctgcaccaagaatttggtgactggagagtccgtctacggtgagaagcgcgtctctgttcagaacgaagacggaactaagattgagtacagggtgtggaaccctttccgctctaagctggcatctgctattcttggcggtgtcgataatatctggatt

SEQ ID NO: 4815 - DNA, 258 bp, Lilium asiatic
aaaaaatgatgaaaatatgaggattttttttttttatgagctaatattaaatctatggacggaatgttatttatgccgtctaaaaggcattctgaacatccagaaaattcagaagggggtctcctacttgagactactactgctttaatgctctcggtcgctacttctaaagcgaccaagattacctgcgctggcatgcatcgctacaactcttttatacgccaactaaaatgacaatcactgtaccactcatttaca

SEQ ID NO: 4816 - DNA, 304 bp, Lilium asiatic
cccacgcgttcggtttacaccagtgagacttgtggcaagactccgctggatgtaaagcatgcggttctggctgttgcttacagcataaataacggcgtcccgtattggcttatcaagaattcatggggaaatgactggggagttgatgggtacttcaagatggagcttgggaagaatatgtgcggaattgccacttgtgcttcctacccggtcgtcgcataatacgagcaccattcaaggtctttctaccaaggtcatgagggggattgttaaataaaatatctgtaagatgtatttcagatta

SEQ ID NO: 4817 - DNA, 403 bp, Lilium asiatic
acgatggattagcttgaagacatggacacttcagactccgaggcgtctgattctgaagatgagccggaacatgacgttgctgaagcggacatgctagaatcagcgaagaagatgtcgaagaggagatacaaatcgatagctgtcgcgaagcccaaggtagaagttaacaacccgaaaccagagacagagattgaagaggccaattcaaaccccgaaaaatccgagtctggtgtgtgctgctcatgctcacgggtctattcctgcaagacgaagaagcgcgaatgtcatgcagctggtggcacatgcagctcttcctgtggatgcgtggcgtcaaagtgtgctaacagagcagacggatttattcggaaatcgattgatgaagcacacttcttggccgataatg

SEQ ID NO: 4818 - DNA, 314 bp, Lilium asiatic
cccacgcgtccgcccacgcgtccgaaacatttgaagtcattaggtctcttgatatctggaaggtggtcaagaatcgggagcaagtgttggagttgctcaagaccaaattgaaagaagcggcgttgcaagcctacctctttttctactcgccatgttacaactctctgagtctagaccagcttttggcaatgtttgacctctcagaatccgatactcgcagaattgtgagcaagatgatgatcacggaggagctacatgcgagctgggaccagcaggctaggtacattgtgttccataactcttatcatcattct

SEQ ID NO: 4819 - DNA, 337 bp, Lilium asiatic
cgacgtcaagaggctcagcgattgggtcgtattctgagggcaaagggtcgacttcaagataggatggcaggaggaaaagaagagtacaatgccttcttctactcgctagtatccacggatacacaggagatgtattattcgactaaaaggcagcaatttttgatagatcaaggttatagctttaagatcatcacgagcttgccgcctcctggttcagggcctgagttgagcctctaccaccttgatgagcaactagacttactgaacaaggtcctgaatgcaggggatgttgaagctggattagagcagctggaagaagatgctgatgatatcacgc

SEQ ID NO: 4820 - DNA, 244 bp, Lilium asiatic
tcgagccacgaccacgcatgccaaagctaaatctatcttactcattttaagcccaaacaagggacggaaagagcggggggggggcggaaccaagcaccaccggaaggttctgctactacaacatacacagcattaccaagccagagatctcatcgcctgtctcagccggggcggagtgaatagaatcagggtatctcatctacgatgataacaagcttgtactgaacatatttatggacaacgt

SEQ ID NO: 4821 - DNA, 198 bp, Lilium asiatic
  modified_base (7)..(7): a, c, g, t, unknown, or other
ggaaganccgggccgacccacgcgtacgcctagatcgacaccggccaaactatttgattcaatcttacctactcatatcatgcgaggtcgtggataatctatagcaagacctaaatttaattcactgcacgttgaattacaacgtctttactgcctaaaccctttcctaatccaacttattcaactttctgaacatac

SEQ ID NO: 4822 - DNA, 293 bp, Lilium asiatic
  modified_base (3)..(3): a, c, g, t, unknown, or other
  modified_base (5)..(5): a, c, g, t, unknown, or other
  modified_base (8)..(8): a, c, g, t, unknown, or other
  modified_base (23)..(23): a, c, g, t, unknown, or other
  modified_base (26)..(26): a, c, g, t, unknown, or other
  modified_base (166)..(166): a, c, g, t, unknown, or other
gancnggnaccttacaaggaagncanggcggtttacaagagtggagccacaccagtgaatgcagagtaggacaaccgttcggagtctgaatagtgatagtagtgttgtcaatgttaagaccgtctttatgaaataaggctcctttctgttaaaagatgtgaagttngatgctgtacatcttcttttcttcgtcaaaataatggtgctgtattgtgaagtgtgggatgttgcaactgttatatgggtggggatggaatgcaatataaaaactattgcaattattattctttgtc

SEQ ID NO: 4823 - DNA, 312 bp, Lilium asiatic
gcagggaaagagaaaagcaatggctggccaaccaggagaacttccatgccaatgcagagaaacaggacgggaaaacaaatgctgagccgattccacaggagcgagctaacagcgacaagaacgggaagaaggagcaggagaagaacccctcccttgtcgtcatgcagggtccaaagccaggcaagcctacagacctctcaagaatgcgagagatactgctcaagtggaagtattctcccgtgacccatgtgaaactcgcaccaccaccaccacctgccgctgcagacaaagaatccggcgggaatgtcagca

SEQ ID NO: 4824 - DNA, 288 bp, Lilium asiatic
  modified_base (11)..(11): a, c, g, t, unknown, or other
atgcccattgnccgtgagcaaccggctgttgaagtggtgaaggggactgaacaaatgaaagcattcaaagcctatggcaagctaagggttgagaggatgaaccagaaacagattggggctaggatgaaaaaggctgcagaggctgagaaagaagagaagtgaatgaacaagacgaggtcttaaaattctggggattacctacaagaaacacctcttaagaagtatttatggttgttgagagccttcttgcgaacctttttattataatactattaattttgaggatgc

SEQ ID NO: 4825 - DNA, 336 bp, Lilium asiatic
cgaactttattccttcggccatagtttctgcgctctccacaactgccacgctctatgataagcaaggtgggccaatcatggcccaacatgcatatagcaacagcgattcaacgcaattgcctgcaacaccctttgacatgggtagcggcttcgtaaatgcaactgctgctttagatcctggactgatattcgactctgtttttgaagacttcctctcctttatttgcggtatccaagattctgctcctgtaattctgaattacactggctatagcttggggacttcgactattagtggcgcagacctaaacttaccttctattactctcgcattac

SEQ ID NO: 4826 - DNA, 321 bp, Lilium asiatic
gacccacgcgtacggctgattatttggtctcttaaaaaaaaaaaatttaaaaaaaaaaaaaaatttaaaaaaagaagggaaaaaaaaaaaaaaagaaaaaaaaaaaagggaaaaagggaaggaaaaaaaaaaaaaaaaggggggcctaaaaaaaaaatgaaaggtcaaaggaggaaaaaaggggagaatggaaaaaaagctggggggaaacaaaaaaaaaagggaaggacgggaaaaaaccaacgggagagtgggggaaaaaagaagagggccgaaacaaaaggccgtagaaaaaaaaggcccgaacaaaagggggatggg

SEQ ID NO: 4827 - DNA, 340 bp, Lilium asiatic
ctggggattctacacctgaggagctggccagtgccactcagctccagggcacttacatgcccattgtccgtgagcaaccgtctgttgaagtggtgaaggtgactgaagagatgaaggcattcaaggcctatggcaagctaagggttgagaggatgaaccagaaacagattggggctaggatgaagaaggctgcagaggctgagaaggaagagaagaagtaacctgttcgttgctttaatttgtggtgatttgtccaagtaaaccccctcaagagtaattttggttctgttggtctttctgtcgtacctttctattataatactatgaattttgaggatgc

SEQ ID NO: 4828 - DNA, 397 bp, Lilium asiatic
atcctcaatcctctctcaatttcctctgatgttttcttcaacgccgagaagaagcccgcggagaagaagccggtggcggagaagcctgccgccgaggaggagaagaaagctgccccggcagcagcaccggcggagaagaagccggccgagaagaagcccaaggccgggaagaacgttccggcctccaagggcaaggagggggagaagaagaagaagaggtcgaagaagtcggtggagacctacaagatctacatcttcaaggtgttgaagcaggtccaccccgacatcgggatctccatcaaggccatggggatcatgaacagcttcatcaacgacctcttcgagaagatggctcaagaagtctgccgtctcgcccgctacaacaagaagaatacca

SEQ ID NO: 4829 - DNA, 250 bp, Lilium asiatic
acaaccggtgttttatgggaacgtgctgaaatatgaagcattcaacgcctatggcaagctagggatgaaggtgaaccacaaacagattggggctaggatgacaaagctgagaggctgagaacgaagaaagaagaacctgctcgttctttaatttgggtgatttgtccaagaaaaccctttcggaataatattggtatcggtggttttctgttaacctttttattataaatactataaaattcgaggatgc

SEQ ID NO: 4830 - DNA, 202 bp, Lilium asiatic
attatatagacattcatctgcatctatatttttaggaaactatttaatcgtttaatttgctgtggcctgttggatccattgttttagtttgatgttggtctagtgtgacgttgcttttttttttgttattgtgctgaaagtaaacatggatgtttttgtttgtttggtatgatctaatgatgagagttttttaagattgtgc

SEQ ID NO: 4831 - DNA, 449 bp, Lilium asiatic
  modified_base (61)..(61): a, c, g, t, unknown, or other
  modified_base (223)..(223): a, c, g, t, unknown, or other
cgacccacgcgtacgaggacgcgtgggcggacgcgtgggcggacgcgtgggatttatgcanaaaataaaaaaaaaaaggaaaaaaaaaaaaaaaagggagaaaaaaaaaaaaaaaaaaaaaaaaaaaaaaaaaaaaaaaaaaaaaaaaaaaaaaaaaaaaaaaaaaaaaaaaaaaaaaaaaaaaaaaaaggggaaaaaaaaaaaaaaaaaaaggggggggggntaaaagggaaaaaagttaaggaggggggggggggaaggaaaaagttttttaaagggggaacaaaaaaaaaatgaaggggggggggtgaaaaaaggggggagggggaaaaaacggggggaaacaaaataaaaggggggggaaaaaaaaccccttttgggaagggggggaaaaaaaaaaaagggcggaacgaagggttttaaaaaaagtggaaaaccgaaaggggaaa

SEQ ID NO: 4832 - DNA, 378 bp, Lilium asiatic
  modified_base (335)..(335): a, c, g, t, unknown, or other
cgagatcaaactagagaaagtgaatcaagagtttaccggcgatcggagatggggaagacaccggtgcgcatgaaggcggtggtgtacgcgctgtcgccgttccagcagaaggtgatgccggggctgtggaaggacctccccggcaagatccatcacaaggtcagcgagaactggatcagcaccatccttttgctgggcccgctcgtcggcacctacagttatgtccagtggtatgaggagaaggagaagcaggcccataggtactgagattcatcctgtgttggtcacaatgtagcatcctcgttggtaaagctctgtggtattgcagacgtggntggtttcttgtgtttgtattttgtagagagttaatctcatacc

SEQ ID NO: 4833 - DNA, 410 bp, Lilium asiatic
  modified_base (9)..(9): a, c, g, t, unknown, or other
tccacgcgnccggtttgccctactttgcgttttagttgcacataatgttatgtagatcgaaggtgttgataataaacactttggaatgtgtgtgcggtacgaattacctagctctaaaatgacatggaaagaatgatgtcctccccgttcccctaccctgcctcactgttttttcctcctctccccggactcctccctcgtcacgttgaactgtctccctctttcttgctcctttcttcttccatcttctttggctaacttttcttttcgtacgatctgatctgcttgccacgttcggggccctactcaagcagcctgggataatgcccatgatcgaaccctaagaagaaaattcactggtggggggtggttcatagcttaatggaaattatttttaagataagaaagga

SEQ ID NO: 4834 - DNA, 409 bp, Lilium asiatic
  modified_base (9)..(9): a, c, g, t, unknown, or other
cccacgcgnccttttaaatttgcacgagatggttaacagagcgaagcaatccagactggtgagcggaatccattaggtattctaaagaggaaagaaggcgctgttgcaggcagcaatgaaatagcacaggatggtgaacggagcgaagtgccacggactgagcgaattcctttagctactctaaagaggaaaggagtggcagttacaggcagcagcaaagcagcacggtctggtgagcgaggcacacactgtgctctgtgtcaggtgagcaccaccagtgagataggcatgaaggagcacctgaccggtaagaagcatctggcaaatgtagcaacccttgctgcaaaaggcacagggaccttcaacatctctgctttcgtttctaaacgcaagggtgggaacacatcta

SEQ ID NO: 4835 - DNA, 428 bp, Lilium asiatic
ctaagactgactgttacggcgacggtgacaattaccttaaggagcttttggaaatagtcggtgtgagattaaaggaatgttgagaggctatataatgcccaagatgtagaaaaaaggaagtttcatgcctggtcactctttctgaggactaggagcacttctatcaccaattaaagctggatcctctatatctcagaggatatgatctaaagttcaagtcagtgaggtaattctagtgagtcggtgaggcaatggcgagattctgatagttcttgagatgcaatttaaggtatagtatagtttgatgatatattacttcttctagttctcatatgaggttagtatagtagcttatttcatatacttcgagctttcctatcattgtaatagagtaaggaacttcttctaaatacaaattcatgaattcg

SEQ ID NO: 4836 - DNA, 154 bp, Lilium asiatic
cccacgcgtccggttgatgtcacttgtttcattattgctagattataatgtatagatagttatggcgatgttacccgaattttaataaaatgtgtactaaagtgctagaattattgtggcatgtgatatgtcaaaattaacctttctagatggt

SEQ ID NO: 4837 - DNA, 303 bp, Lilium asiatic
  modified_base (5)..(5): a, c, g, t, unknown, or other
  modified_base (12)..(12): a, c, g, t, unknown, or other
  modified_base (30)..(30): a, c, g, t, unknown, or other
  modified_base (42)..(42): a, c, g, t, unknown, or other
  modified_base (51)..(51): a, c, g, t, unknown, or other
  modified_base (70)..(70): a, c, g, t, unknown, or other
  modified_base (84)..(84): a, c, g, t, unknown, or other
  modified_base (122)..(122): a, c, g, t, unknown, or other
ccggnccggaancccgggccgacccagcgnccgcccacgcgnccgtttggntgcaaaagaagggttcgangagccaggggaagncccagcaggggcgcgcatataagggaatagagcggcgncaagcaacaaggctgcagggaagaacgtgatgcaagagatgatggacgcgtggggaaagtataacatcacctgcgacatcgagtgggtgaagccagactacatcaacgtggcattggacaagatcgcggaaaatgatgagcgcgaccggctcgtcaatgacatagcaggggagacaaatct

SEQ ID NO: 4838 - DNA, 439 bp, Lilium asiatic
  modified_base (411)..(411): a, c, g, t, unknown, or other
cggacgcgtgggctggcggagaagacggagaatctgtcagttacggagccaggagacccgagctttgtcgggatgaagaagaagaagaagaagccgaagccggtgcagaatgaccttcctgctgaagaggagggcgatgctgaagaggatgttgaaggggaagcatttggggaggatgagcaaggagaggggatcgtgctgggaggtctcacccgatacccgtgggaagggactgatcgggactataagtatgaagagcttctggatagggttttcaatatcttacgggagaacaatccacatcttgctggagataggcgcaggacagtaatgaggcccccgcacgttctcagagaaggaacaaagaaacagtctttgtgaacttatggatctctgcaagacgatgcatangcaaccggagcatgtgataatgttttac

SEQ ID NO: 4839 - DNA, 425 bp, Lilium asiatic
cggacgcgtgggcggacgcgtgggcggacgcgtgggttgaggcgctggggagggagaaggtgcagagcggggatgtgatcatgctggatagggcgtcggggaaggtgacgaagctggggaggtcgattgggaggtcgagggattatgatgcgatggggccgcagacgaagttcgtgcggtgcccggagggggagctgcagaagaggaaggaggttgtgcattgtgtgacacttcatgagattgatgttatcaatagcagaacacagggatttctggcactcttcactggtgacacaggcgaaatccgtgctgaggtgagagagcagatagacacaaaggtgagtgagtggagagaggaaggaaaagccgaaatgatacctggtgttctgttcattgacgaggtccacatgcttgacattgagtgc

SEQ ID NO: 4840 - DNA, 358 bp, Lilium asiatic
ctaattccccttgcagacgtctcatcgagtgttaacagccatggcggagatggaggaggcggcgccggcggcggcggtttcccggaccgtgaaggacgtcgcgcctcaggatttcgtgaaagcttactcttcccatctgaagcgatcgggaaagatggagcttccccactggacagacattgtgaagactggaaagtttaaggagcttgctccttatgacccagattggtattacatcagggccgcttctatggcaagaaagatctatctgaggaatggtattggagtgggtgctttccaaaaaatctatggaggacgcaagaggaatggtagccggcctccacatttctgcaaaaag

SEQ ID NO: 4841 - DNA, 327 bp, Lilium asiatic
  modified_base (10)..(10): a, c, g, t, unknown, or other
cccacgcgtncgcggacgcgtgggatccctcatagcttctccaatggcggacaccggcgaactcctccgccaccgtgagccgacttctaccaccacacctccacctccagtgaaagcgacatcatcgacggcgacatcagtgaccttcccctacctccacgacaaggacgtcgatgatgtcgacgcccactcctgaagccggttaccttccctccaagtttgaagatgaaggtgacatcatcgacggtgacatcttcatgttcaccgtcttctacctcttctccaaggcacttcctcgacagcgaccttcattgatggcgacctcta

SEQ ID NO: 4842 - DNA, 450 bp, Lilium asiatic
  modified_base (12)..(12): a, c, g, t, unknown, or other
gacccacgcgtncgcggacgcgtgggcggacgcgtgggtcctaagtttcaacattgacctcgatgtttgaagtcggacaagataaagtatgggaatgaccgaatgacaacttttatagctcaaaacatatgtaagatcgggaggggaggctaactaaggctgattaatagcccctatctgcctattgtattttataacttcgaccaaaattatagccaaacattgtaggaagtgaaacaagtctcgatattatataaggggtaacctaaaattgattaaccaatcaaaataacaaagtaactttgaaaagtattcattcaatcattcttaatccctaaagataatatcaaataacttcggcaaacataacccatgaaacctatctattcggtacaaaggttgaaaaatataaactttttagagctgggctaaccccgaaagaagttattc

SEQ ID NO: 4843 - DNA, 288 bp, Lilium asiatic
  modified_base (5)..(5): a, c, g, t, unknown, or other
  modified_base (20)..(20): a, c, g, t, unknown, or other
  modified_base (30)..(30): a, c, g, t, unknown, or other
cgccnaccccggtttccggncgacaccganatacagaagcataccatcaacgcctctggccactaaaccacagagacgcaaccagaataatcagccacctccacaacaatcaagaatgtcgaggccgtcgttcctgccgtctcctgcagccatcttctcctcactgaggagagacagtggtcagaaccagcatagcagcagattggagaaggagagggagtcgatcctacaatacatgatattctacagacggccctacgacgagattgtgtaccgggcaaagatgcg

SEQ ID NO: 4844 - DNA, 114 bp, Lilium asiatic
aaaaaaaaaaaaaaaaaaaaaaaaaaaaaaaaaaaaaaaaaaaaaaaaaaaaaaaaaaaaaaaaaaaaaaaaaaaaaaaaaaaaaaaaaaaaaaaaaaaaaaaaagggggggcc

SEQ ID NO: 4845 - DNA, 403 bp, Lilium asiatic
  modified_base (9)..(9): a, c, g, t, unknown, or other
  modified_base (17)..(19): a, c, g, t, unknown, or other
  modified_base (22)..(22): a, c, g, t, unknown, or other
  modified_base (24)..(25): a, c, g, t, unknown, or other
  modified_base (325)..(325): a, c, g, t, unknown, or other
cccacgcgnccgttcgnnncancnngaagagttctgaagtaatggagtccggaaagatagccaagggcgctgccggccgcaagggcggagcaaagaagaagtccgtcccaaaatccatcaaggctggcctccagttccctgtcggccgcattacccgttttttgaagaagggccgctatgctaagcgcgttggctctggagctcctgtctaccttgctgccgtccttgagtaccttgctgccgaggtgctggagctggcgggcaatgctgccaaggacaacaagaagtcccgaatcatcccgaggcacatctgccttgctgtcangaacgatcaggagcttggcaagctgctcgccggagttaccatctcccacggtggtgtgatccccaacatcaatccggt

SEQ ID NO: 4846 - DNA, 351 bp, Lilium asiatic
aaaaaaaaaaaaaaaaaaataaaaaaaaaaatttttaaaaaaaaaaaaaattttaaaaaaaaagggaaaaaaaaaaaaaaaagaaggaaaaaaaaggggggggggaaaaaaaagaaaaaaaggtaaagaaaaaataaatgaaggggggggcggtttaaaaggagcaaagttaaataaagggggggggggggggaataaaatgttaggggggggaaaaaaattaaaggaaggggcgggagtttaaaaagggggagaggggaaaaacccggggggggaaaaaaaaaagaggtggaaaaaaaacgccttttgaaaaaggggggaaaaaggaaaggggaagggaacgtgcccttt

SEQ ID NO: 4847 - DNA, 417 bp, Lilium asiatic
  modified_base (9)..(9): a, c, g, t, unknown, or other
  modified_base (48)..(48): a, c, g, t, unknown, or other
cccacgcgnccgttgactgtgagcagatgattttaacatgaacaaaangcccgatgttgccatgactcttgctggtgtcgcattgtttgctgacgggccaacagccatcagagatgtggcttcatggagagtcaaggagaccgagaggatgatagccgtctgcacggagctcagaaagctgggtgccacagtcgaagaagggcctgattactgtgtgatcaccccacccgagagggtgaatatggcagcaatcgatacatatgatgatcacaggatggcgatggcattttcgctcgctgcctgtgcagatgttgcaatcacaaataaggaccctgggtgcacacggaaaacttttcccgactattttgaagtcctcgagagatttacaaagcactgacatggtgtcggatgactgaa

SEQ ID NO: 4848 - DNA, 424 bp, Lilium asiatic
  modified_base (1)..(1): a, c, g, t, unknown, or other
ngaatctcttgttcaggttactgtaataccgaaagggaaggagcacatgtctgcgaaggaggacatcgcccaccgtggtgtcaccgacaagctacaacaggtcttgaacagagtcaaaagtgctccgaaaggtggtatgtatgacgacctctacggtgattcagtttctgctaaggtgggctcgtcttgggcttacaaatcggatgcgcatacagcatccacgagaaatgttgaagagaagcttccgaatcaaacacacaatgccagttcagatagcgatgatctttttggtgactagatggaatgacaagcgagaccttatcactgtttttgagacttctgtacctgaggaattatgttgtaatctatcatcatagttttttttgatgtgatgctataacagaaaggtacatcggctttgcgt

SEQ ID NO: 4849 - DNA, 321 bp, Lilium asiatic
ggaatatcttcaccatccagcccagatggtggtggcggcatggccgactcagatgatgagcccctctctgtgtggagagcacgtgccagaagagccaagtgaagctgctaattacctctaagaaatcacagcttgggatggcgatcgatgctaatctgttcaaacttgttcggcgtcaaaataaggaatgcaatgtgttggattgtctcttacgtacacgaatatagctcattgtgcataattaattacatactagaaatagttggggatttgtactgttatctcgaggcttgtttaatgtgaatgttctgttattagctt

SEQ ID NO: 4850 - DNA, 453 bp, Lilium asiatic
cacaacttgactgaaagtgattttgagaacttttctcggaggacagcatggttttctggttcagatatttctgtttgtgttaaggatgttctttttgaaccagttcgcaaaactcaagatgccatgtttttcacacagaccccgaatggcatgtgggtgccttgtgggccaaagcagcggggagctgtccagaccaccatgcaggagcttgcagcagacggccatgctgccaagattcttccgccaccgatttcaaagacagattttgataaggtattagttaggcagagaccaactgttagcaaatctgaccttgaggtgcatgagaaatttactaaagagtttggagaggatgggtgattgatgccgtaatggaattgattgcaatggtatagtgtaattttttgattggacgttttatctgattatatgaacccaatctattgattcatc

SEQ ID NO: 4851 - DNA, 432 bp, Lilium asiatic
  modified_base (249)..(249): a, c, g, t, unknown, or other
  modified_base (263)..(263): a, c, g, t, unknown, or other
aaaaaaatatttagacgaccacagctattaccggaaaggggcagagaagaggcgtgtgagaagatggcttttgccgtggcggagatggctgccgaggcggagacgcctgccgaggcgagaaagtggctggagagccaccgtgttaccggtaaacacagtgtctccggaggtcccttcgacttcatcctcatgtcgccgctatcagtctcgctaatcgaggccggtcgcgctctctgcacctaccgcgtncccgcccacgccgncgacgctgacagtaactgggaatcgggtgctatcgcgacggtgattgatgacgtcggtatcgcggccatcatgaccacggagggagtcgtcaaagtctcggtcgacttcgacatctccttcttctcacctgccgaaaataatgaggagttggaaattgatgctcgagtg

SEQ ID NO: 4852 - DNA, 322 bp, Lilium asiatic
gaccacgcgtcgggcgctgaagaattcttggagacgtcatttttgagccgcacctatctgagcacgcccgccggaagacgctaccgcatggacgggtgtacgccctaagcgccagggccgaccctctacggcttcggcggctgatctatctatggtctgctcggtgattggatcttggattctgtaggttccgttactctatcggcgtaatttcagctatatttcttgagaaaaatttatatgtgggaaattatgactatttgcgctatggtcttttgttccgtgatttatattttgataaagcttaattgattgggatgtg

SEQ ID NO: 4853 - DNA, 223 bp, Lilium asiatic
  modified_base (2)..(2): a, c, g, t, unknown, or other
  modified_base (11)..(11): a, c, g, t, unknown, or other
  modified_base (17)..(17): a, c, g, t, unknown, or other
  modified_base (23)..(24): a, c, g, t, unknown, or other
  modified_base (38)..(38): a, c, g, t, unknown, or other
  modified_base (48)..(49): a, c, g, t, unknown, or other
  modified_base (53)..(55): a, c, g, t, unknown, or other
  modified_base (57)..(57): a, c, g, t, unknown, or other
  modified_base (59)..(59): a, c, g, t, unknown, or other
  modified_base (70)..(70): a, c, g, t, unknown, or other
  modified_base (82)..(82): a, c, g, t, unknown, or other
  modified_base (87)..(87): a, c, g, t, unknown, or other
  modified_base (91)..(91): a, c, g, t, unknown, or other
  modified_base (97)..(98): a, c, g, t, unknown, or other
  modified_base (112)..(112): a, c, g, t, unknown, or other
  modified_base (120)..(120): a, c, g, t, unknown, or other
  modified_base (123)..(123): a, c, g, t, unknown, or other
  modified_base (126)..(126): a, c, g, t, unknown, or other
  modified_base (130)..(130): a, c, g, t, unknown, or other
  modified_base (134)..(135): a, c, g, t, unknown, or other
  modified_base (137)..(137): a, c, g, t, unknown, or other
  modified_base (147)..(149): a, c, g, t, unknown, or other
  modified_base (151)..(151): a, c, g, t, unknown, or other
  modified_base (166)..(167): a, c, g, t, unknown, or other
  modified_base (182)..(182): a, c, g, t, unknown, or other
  modified_base (184)..(184): a, c, g, t, unknown, or other
  modified_base (188)..(188): a, c, g, t, unknown, or other
  modified_base (191)..(191): a, c, g, t, unknown, or other
  modified_base (196)..(197): a, c, g, t, unknown, or other
  modified_base (206)..(207): a, c, g, t, unknown, or other
  modified_base (209)..(211): a, c, g, t, unknown, or other
gngaaaccaangttcgngaagcnncaccgattttgggngcagaggacnncagnnncnanggacagaagangccaagcgccancggcnggangggcannggaaacaaaacgcnggggccancanacncgcngcanncnccaaaccccnnncnggaggagcaggcacnncccaacggagccgcncnacangcngcagnngcaacggcnnannnggacgcccacac

SEQ ID NO: 4854 - DNA, 307 bp, Lilium asiatic
  modified_base (2)..(2): a, c, g, t, unknown, or other
  modified_base (4)..(4): a, c, g, t, unknown, or other
  modified_base (8)..(8): a, c, g, t, unknown, or other
  modified_base (50)..(50): a, c, g, t, unknown, or other
cncncagnccccttggggagggacagcgcgtttctctcactctcatatangaggggccgatagttgtgcatgttggtgatttcttggagaaattgttctatgatgcggttcggttcgaattatgatagtgttttgatgattcagatttttctttggagtaatttggattcaactcttcatctaccatgatcaagtaggtctctacagttgtaatttatgtgtttgttggtatacttgagatggattttgaggtttaataaaccaaaaaaaaacaaaaaaaaaaaaaaaaaaaaaaaggaagacacaa

SEQ ID NO: 4855 - DNA, 364 bp, Lilium asiatic
aaaaaaaaaaaatttaaaaaaaaaaaaaaaatttaaaaaaaaaaaaaaaaaaaaaaaaagggggggagaaaaaaaaaaaaaaaaaaaaaaaaaaaaaggaaggcgacaaaaaaaaaaaaaaaaaaaagaaacaaaagaaaaaaaaaaaaggacgaaaaaaaaaaaaaaacaaaacaggaaaagggggggggggggcaaaaaaaaaaaaaggatggggaaaaggccgggaaaagaaaagggcttaaaaggggggacggaaaaaaacatacaggggcgggcgaaataaaaacgagggggggggaaaacggggggcgccccaaaagagaacccctaacggaaaatgcgccgtgggcacgggggggag

SEQ ID NO: 4856 - DNA, 385 bp, Lilium asiatic
  modified_base (1)..(1): a, c, g, t, unknown, or other
  modified_base (4)..(4): a, c, g, t, unknown, or other
  modified_base (10)..(10): a, c, g, t, unknown, or other
  modified_base (23)..(23): a, c, g, t, unknown, or other
  modified_base (28)..(28): a, c, g, t, unknown, or other
nccnccaccncattatcgctacnaagancatgttttagcagaatcagataactctgttactgtgagctttagttgtgttactttttaatttctgtcttctgcactagctacctagaatcgtatgacttgtctctgtggaactgcatcaacatttgtcaaaccaggtattggtgttgaatgctttaaaaaaaaaaaaaaaaaaaaaaaaaaaaaaaaaaaaaaaaaaaaagggaggaaaaaaaaaaagaaacaaaaaaaaagaaagcaagcaaacgaagaaaaaaaaaaaaaaaaaaaaaaaaaaaaaaaaaatggggggggcggttataaaggaccaaagttactggccccggcctggcaacaaaaaaatttttttatggggcac

SEQ ID NO: 4857 - DNA, 284 bp, Lilium asiatic
ttccacgcgtccgttatgattaagttcaacagttctaatcccaccactgggtgccagaagaagctcgagatcgatgatgactcgaagcttcgggctttttatgacaagcgtatctcccaggaagtcaatggtgatgctctaggagaggagttcaagggatatgttttcaaaatcatgggaggatgtgacaagcaaggctttccaatgaagcagggtgttcttactcctggccgtgtgagacttctgctacacagaggaacttcttgttttcgtggatttggtat

SEQ ID NO: 4858 - DNA, 145 bp, Lilium asiatic
gcccacgcgccggtgagggcagctggcgggctagggcatttggagatcgacttgagagacatctagttctgaaccggatgggggaagtcgatatagatgtgggcacgaatgataatcctggcagcgatgtttatggaaggtatgt

SEQ ID NO: 4859 - DNA, 235 bp, Lilium asiatic
ttaaagatcatatcgattgcagacttaattagatatcggaggaagagagataagctggttgagcgtgcttctgtcgcacacttacctttgaagtggggttctgttcaagcgtattgctatcggtcactgcttgatggaatggaacatattgtcatgggtaaaggggatattggagatgggcaagacattttaataagggtgcactccgagtgtctcacgggagacatattcggat

SEQ ID NO: 4860 - DNA, 305 bp, Lilium asiatic
tttgacttgatttcggagtctgatgtgtggcatttatgggttactctagttctgaacttgttttgcaatattgtaacagattgttgtggagtcggcttttttcatggatagtcacttttttttgttaaacaaaaaaccaggtattgaaaaaaaaaaataaaaagaagaaaaaaaaaaaaaaaaaaactaagaaaatagtttaatagaattaaagtaaaaaaatactatatacaatacaaaaaagggcggcctgtttaaaggttccaagtttacttccccgggcttgcgaacgtatatcttttttt

SEQ ID NO: 4861 - DNA, 365 bp, Lilium asiatic
  modified_base (7)..(8): a, c, g, t, unknown, or other
  modified_base (34)..(34): a, c, g, t, unknown, or other
  modified_base (40)..(41): a, c, g, t, unknown, or other
  modified_base (44)..(44): a, c, g, t, unknown, or other
  modified_base (46)..(46): a, c, g, t, unknown, or other
cacgcgnncgggagacttccggacaggactttgngaagcnngcnantttcgctcttctggaggttgttgagagtggtgggaagaacattgaaattgcagttatgacgaaagagggccttagggagcttgatgaagctgacatcgacgcaatcgttgcagacatagaggccgagaaagctgcggctgaggcagcaaagaagcccgcccccagagatggttgattcctgatactgctatctgttatttggagagtttctgtcagtaccagaattgtattttctgcaggtttgttactttaaactctgttgcgtctgtaatttgaatgttcagtatggtagaactgccgaatttgatattccattagc

SEQ ID NO: 4862 - DNA, 432 bp, Lilium asiatic
  modified_base (17)..(17): a, c, g, t, unknown, or other
  modified_base (20)..(20): a, c, g, t, unknown, or other
  modified_base (37)..(37): a, c, g, t, unknown, or other
  modified_base (80)..(80): a, c, g, t, unknown, or other
  modified_base (83)..(83): a, c, g, t, unknown, or other
  modified_base (89)..(89): a, c, g, t, unknown, or other
  modified_base (95)..(95): a, c, g, t, unknown, or other
  modified_base (98)..(98): a, c, g, t, unknown, or other
  modified_base (101)..(101): a, c, g, t, unknown, or other
  modified_base (110)..(110): a, c, g, t, unknown, or other
  modified_base (137)..(137): a, c, g, t, unknown, or other
  modified_base (173)..(173): a, c, g, t, unknown, or other
  modified_base (202)..(202): a, c, g, t, unknown, or other
  modified_base (210)..(210): a, c, g, t, unknown, or other
  modified_base (219)..(219): a, c, g, t, unknown, or other
  modified_base (226)..(226): a, c, g, t, unknown, or other
  modified_base (247)..(247): a, c, g, t, unknown, or other
  modified_base (264)..(264): a, c, g, t, unknown, or other
  modified_base (267)..(268): a, c, g, t, unknown, or other
  modified_base (273)..(273): a, c, g, t, unknown, or other
  modified_base (280)..(280): a, c, g, t, unknown, or other
  modified_base (286)..(287): a, c, g, t, unknown, or other
  modified_base (299)..(300): a, c, g, t, unknown, or other
  modified_base (310)..(311): a, c, g, t, unknown, or other
  modified_base (313)..(313): a, c, g, t, unknown, or other
  modified_base (315)..(315): a, c, g, t, unknown, or other
  modified_base (321)..(321): a, c, g, t, unknown, or other
  modified_base (323)..(323): a, c, g, t, unknown, or other
cccacgcgaccgttgcngcnccggcaaagatttcaanagccccaccaccggcgaagaaggcggggcccgcgaagaaggcngcncccgcngccacnccnaanaaggccgcnccggcagcgaagaagaaggcggcgacnccagcgaaggggaaggccccggcgagaaaggcaccngcaaggaaggcggccaagaagaaggccgnggaaacgngaaaccganggcagcnggccggaacaaggcggacgcncgagggggcacgagcgncgnnggcangccaagnaggccnnccgggggggccnnaaggggaacnngngnaccccncnctccccacccaaactcgtttcttttatatattacctgtttggttttcagtgtccatctgatcgtttgagacattatctagctgtaatttgggtactatgtggtcccctg

SEQ ID NO: 4863 - DNA, 304 bp, Lilium asiatic
ctgcaagagggcgtcggcgtccgtgggcatctccttcggggctgtggcttgctacatcctcctctctctcatatcctcgtaccggctcttcagcacctaccaagctcccatccctttcctcagttccaagggtgttgagatcgcggcctttcctcgctgaggctgatagctccgcccgttctgcagcaagtcgacgtcgtgctcatatattgtgtactttggtatcatggtttgcaaataatatgttctcgctaaaattgtctctctttcttacttctaattatgtttgggtgagcgtgtttct

SEQ ID NO: 4864 - DNA, 200 bp, Lilium asiatic
  modified_base (9)..(9): a, c, g, t, unknown, or other
  modified_base (21)..(21): a, c, g, t, unknown, or other
  modified_base (157)..(157): a, c, g, t, unknown, or other
cccacgcgnccgttgacgcgngggaaaaaaataaaaaaaaaagggggaaaaaaaacaaggaaggaagggggcggacgcgggcgggggcccaagaagacccacgcgggcgcgcgccggcaagcacacggccaaggggggacaaaaaggcacccaaacnggccggacggggcaacgaccgacaccggggaaaccggggaacc

SEQ ID NO: 4865 - DNA, 420 bp, Lilium asiatic
gacagccagtactccttctccctcaccacctttagcccgtcggggaagcttgttcagatcgagcatgccctcactgccgtcggctccggccagacgtctctcggaatcaaagctgctaatggtgttgttattgcaactgagaagaaattaccttccatcttagtggacgagacatcagtgcagaagattcagcttatgacaacaaacattggagttgtttacagtggaatgggtccagattctcgtgttttagtgaggaagagcagaaagcaagcagaacaatattatcgcctttataaagagccaattccagttactcaacttgtgagggaaactgctgctgttatgcaagagttcacccaatcccgtggtgtaaggccatttggggtttctctactggttgctggttatgatgacaat

SEQ ID NO: 4866 - DNA, 336 bp, Lilium asiatic
  modified_base (12)..(12): a, c, g, t, unknown, or other
gacccacgcgtncggccacgcgtgcgggaaggatttatatgggaactttgtgcttacgggcggatcgacgatgttcccgggcattgctgaccgcatgagcaaggagatcactgcactggctactagcagcatgaagattaaggaggttgccccaccggagaggaaatacagggtctggattggagggtcaatcttggcttccttgagcaccttacaacagatgtggatatcgaaggcggagctcgatgaatctggaccaaccattgttcacaggaagagcttctaaagtgtgtcggccggtcattgaggatgcggggtatttcatctatatactat

SEQ ID NO: 4867 - DNA, 225 bp, Lilium asiatic
aaaaaaaaaaaattaaaaaaaaaaaaaaaaaataaaaaaaaaaaaaaaaaaaaaaaaaaaggggggggggggcaaaaaaaaaaaaaaaaaaaaaagaggggggaaaaaaaaaaaaaaaaaaaaaaaaaaaaaaaaaaaaaagaagaaaaaaagaagaaaaaaaaaaaaaaaaaaaaaaaaaaataataaaaaaggggggggggggggggaaatggaaaaatgaaa

SEQ ID NO: 4868 - DNA, 371 bp, Lilium asiatic
  modified_base (2)..(3): a, c, g, t, unknown, or other
  modified_base (11)..(11): a, c, g, t, unknown, or other
gnnagacaggntttgtgatgctcttatatccatcagagaagaaatcgctgagatcgagaatggcaaagctgatattaacaataatgtcctgaagggtgctcctcatccaccttccattctcatgggcgatacatggaacaagccatattctagagagtatgcggcattccctgctttatggctcagaggattcaagttctggccgaccacagggcgtgtggacaatgtgtatggtgaccgcaatctcatctgcacccttctcccggtatcgcaaatggctgatgaaccagcagctgctactgcataaatgcatgttgctgctttgacagcttatcttacagggttcccgtaaaggaggatacccccatact

SEQ ID NO: 4869 - DNA, 125 bp, Lilium asiatic
  modified_base (8)..(8): a, c, g, t, unknown, or other
  modified_base (12)..(12): a, c, g, t, unknown, or other
  modified_base (15)..(15): a, c, g, t, unknown, or other
  modified_base (32)..(32): a, c, g, t, unknown, or other
  modified_base (42)..(42): a, c, g, t, unknown, or other
  modified_base (45)..(45): a, c, g, t, unknown, or other
  modified_base (50)..(50): a, c, g, t, unknown, or other
  modified_base (52)..(52): a, c, g, t, unknown, or other
  modified_base (57)..(58): a, c, g, t, unknown, or other
  modified_base (73)..(73): a, c, g, t, unknown, or other
  modified_base (90)..(90): a, c, g, t, unknown, or other
  modified_base (93)..(93): a, c, g, t, unknown, or other
caccggcngccnaangacaaacaagaaaccangagcaacacngangggcncnggacnncacaaccccgagaanacaaggacgagagcagnagncaccagaaaaggcaaacaaggaaagccagcgg

SEQ ID NO: 4870 - DNA, 373 bp, Lilium asiatic
  modified_base (2)..(2): a, c, g, t, unknown, or other
gntttacagccccgcttcctcctgtccttcattgcgcctctcgcgtacgctatctcctcctccgccctcacctctcggcgacgcctcagctccaatggaagatttgaaaatgaagaaatgtgtgccgtgtgagtcgaaggatattcgacccatgtctgaacaatcagctactgaattacttcagcaggtacgaggatgggacatggcaaatgaaggtggtattatgaaattgcacaagtcatggaaagtgaagagttttaccaaagggctggagttctttcagcttgtagcgaatattgcagaggcagaaggacatcatccagatcttcatttggtgggttggaataatgtgaaaattgagatatggacttac

SEQ ID NO: 4871 - DNA, 319 bp, Lilium asiatic
atatgcggaaagtaagtatcataaaagaccttcgagagttgacacaagatgtgctccattactacaaaggtgatatcttggatgaacttcctggtttagtagacttcactgtgcatctaaacctgactcctaaacagaaagagatactaaaagacatggaaaaatatcagaagttcaagaggagcgctatggagaatgcagtgtttattcacccgctcttaacggagattagagatcttgcgactgctgacaaagacagcaatgtcactgacgagaagatcgagaatatattaactgagatggatgctcgagatggagt

SEQ ID NO: 4872 - DNA, 280 bp, Lilium asiatic
  modified_base (11)..(11): a, c, g, t, unknown, or other
  modified_base (15)..(15): a, c, g, t, unknown, or other
gaccacgcgtncggnggtggagcccaagagttttaagaaggcggttatttccccaaagaaggcttaaatctgtgctctgggactgttagctgtaggagaagtcttaaatctgtgctctgggactgttagctgtaggagaagtcttaaatctgtgctcttagactgttagctgtagatataagtggtggatcagttgggcagtgtattgtggtttctagtatttgtctgtattccctgttttaatggtttagtgttaaattatgtttgtcttgggtttttt

SEQ ID NO: 4873 - DNA, 291 bp, Lilium asiatic
gcgtccgaaaaaaaaaaaaaaaaaaattttaaaaaaaaaaaaaatttaaaaaaaaaaaaaaaaaaaaaaaaaaaaaaaaaaaaaaaaaaaaaaaaaaaaaaagggggggccgtttaagggggccaagcttaacgaacccggccttgcaacggaaaactttttaaatggggcaaccaaaataaaataaacgggccgcctttaaaaaacgcgggaatggaaaaaaccggggggaaaacaaattaaatggcctaaaaaaaaatccccttttgacaagcgggcttaaaaagaaaa

SEQ ID NO: 4874 - DNA, 380 bp, Lilium asiatic
  modified_base (12)..(12): a, c, g, t, unknown, or other
  modified_base (32)..(32): a, c, g, t, unknown, or other
gccccattgccnacaagtttttacttggagcngctcttttctctgagagcatcggagttatcctagggaagcgatactagctagcatgggcatgttgttatttttattttatttttgaagtagtgtattttgttttgcttctgcatctaaacaaaaaggggtaaccttgatggtgtagatatagtctagacccttagggcggggtggggatttgaatttcagctttcagtggttgcgaatgttttggaagtggtagtagtttgttgggctgggaattttatctttttcattcctaccctagagcatgtaacaaggagctacatgtaactggcattgatgatccggtgatgcgactttggactggcgtttgataatgtaaa

SEQ ID NO: 4875 - DNA, 300 bp, Lilium asiatic
  modified_base (8)..(8): a, c, g, t, unknown, or other
aagctttnaaagctacaacgaggatcaccttctatagttcaaactaccatactaggattgatgatgatgctggagctctgtgtggtccggtgctcgaccaggttagagtctatcctgtggcttagtttgatggtgattttcgaccgttggggactatgttgtcttagtctatctgttcgactatgttgtcttagtctgatatctgtttagttgaagttgatgaagtgagaatgtcactagacatttatatgctacgccgcttctcgttcaagtttggaatgaactcatcggtttgaagtg

SEQ ID NO: 4876 - DNA, 265 bp, Lilium asiatic
  modified_base (116)..(116): a, c, g, t, unknown, or other
aaaaaaaaaaattttaaaaaacaaaaaaaaatttaaaaaaaggggggggagaaaaagagggggggggggggcaaaagggaaaaaggggaaaaaaaaacaaacaaaggggggcaaancaaaagggggggggcggccgaagggggacaaagcaaaaaccaggaaaaggggggggcgaacccaaaaaaaaagggggggccgaacggaaaaaaaggggccgggggggggaaaaacgggggggggggggaaaaacgaaggggggggggcc

SEQ ID NO: 4877 - DNA, 113 bp, Lilium asiatic
  modified_base (18)..(18): a, c, g, t, unknown, or other
  modified_base (48)..(48): a, c, g, t, unknown, or other
ccggctggaaaaacgggncgacccacgcgacggagaggccggattttngatcgccgccggcttttgaatcacggggggagcgggaaacgaagggggaataacgggcgcgcggg

SEQ ID NO: 4878 - DNA, 112 bp, Lilium asiatic
aaaaaaaaaaaaagaaaaaaaaaaaaaaaaaaaaaaaaaaaaaaaaaaaaaggggaatgggggaaaaaaaaaaaaaaaaaaaaaaaaaataaaagggaaggaaaaggggggg

SEQ ID NO: 4879 - DNA, 356 bp, Lilium asiatic
ctccccggacgggtgtttgcttcagtgtggctgcttgcgtcgactctgggcgatgcgcgggcgtttattatcctggcggaggccagcattgagaaaaggaatccgatgagggcgaagtatgcccttcatagggatttgactgcgtctgaattcattgcggctgatattgacaacaatggatacatacgtaaatcggaacttgtgatcaacaagcacaaagtgtgggacacgatctgaaccaatgcaatcaacgcgatatgcaacctatttaagaagatcgatacaggttcacgcgggaagatcacagcgtcggatctttgttaattgccacccatccatatgagcatcaatggtca

SEQ ID NO: 4880 - DNA, 336 bp, Lilium asiatic
aaaaataaaaaaaaaacaaaaattataaatttattaacattataataactatggggattaggggatcattcatatattaaaaaaacaatttaattatatatttaaatttggggggtggcctttttgttttcttgccttcctttcccttcccttcgggtttttttcctttttttatggccccctaatttaactcctcttcccttgttttaaacctgcttgtcttggaaaaccccttgttttccccaatcttattctttttcctgtaattgcttctttttcatagtttttgcttcttttcaatattttgcctcctctttccccccttttccccccttt

SEQ ID NO: 4881 - DNA, 159 bp, Lilium asiatic
gtcccggcctcaggagggggaggaagaagaagaaaggtcgaagaagtcggtggagacctacaagatctacatcttcaaggtgctgaagcaggtccaccccgacatcgggatctccagcaaggccatggggatcatgaacagcttcatcaacgacctctt

SEQ ID NO: 4882 - DNA, 72 bp, Lilium asiatic
aaaaaaaaaaaaaaaaaaaaaattaattaaaaaaaaaaaaaaaaggaaaaaggaaaaaaaaaaataaaaaaa

SEQ ID NO: 4883 - DNA, 402 bp, Lilium asiatic
cggacgcgtgggctaaccaggggcagctgtttgaagctctcaacatgtctgcgctctgggatttaccggtcatactcgtctgcgagaacaatcactatgggatgggcactgcggaatggcgggctgctaagagtcctgcatattacaaacgtggggattatgttcctggtctcaaggttgatggaatggacgctcttgctgtgaagcaagcttgcaagtttgccaaggagcatgttctgaagaatggacctattatacttgaaatggatacttatagatatcatggccactcaatgtctgatcctggtagcacttatcgtacccgtgatgaaatttctggtgtgagacaggaacgtgatccgatcgaaagaattaggaagttgatactatcacatgagctag

SEQ ID NO: 4884 - DNA, 194 bp, Lilium asiatic
cccacgcgtccggtttccctcttgaagtctgccaccaagctccgcgtcctcatgctccgctaccgccggcccaagccttccacagccgacgctgataccaagcagcagccgcagctgaccaagttatccgacaacttaaaggtggaggaggcgcctattgtctcgctcttaaacagacacggtagcgggcgagc

SEQ ID NO: 4885 - DNA, 141 bp, Lilium asiatic
ttttcttgtggcagtatttataaattattccttgcttgtaagactcggggggactagagcattgttgcggaggggattaaatagcgtggaagaggcaaaaatcatgtttgttaatgtgcaatgcttgcatcgggttggttt

SEQ ID NO: 4886 - DNA, 359 bp, Lilium asiatic
aaaaaaaaaaaaaaaaataaaaaaaaattttaaaaaaaaaaaaaaataaaaaataaaatagggaattttataaaaataagagaaaaaataaaaaaatttattaaaatttattaaaattaaatttttttattttataattttttttattaaatttaatttttatgtataattttgattattgttgatttatttaaaatttatatttttttattttgctgttttttatttttaattttttttttttgtatttttttgttttttatttttatttgtttttttattatttttttttttaataatttttttttatatattttttattttatttatatttattatttttgttattttttgatttt

SEQ ID NO: 4887 - DNA, 358 bp, Lilium asiatic
  modified_base (302)..(302): a, c, g, t, unknown, or other
cccacgcgtccgcggatatcaatgcatacgaggtggatctggattcagatgttaagcattgcttctgcagggctagtgatctattggctgtggtggaatagtcatattcggtggtgttgatctaaaactaattttccatcgtccttaattgagaatgttagctgtgtgctagattttactgaggaattattactgtcctagaaagttttagaagccgaggctattttctagttatgtaatttggtgttatactattttgcgtcaaaataatacgccttgaaatattgaaagagttcaggcgncatataaacttttaaacttgctaaaaacccgagcgttagcttttttttcctttatt

SEQ ID NO: 4888 - DNA, 199 bp, Lilium asiatic
cccaaatctccaaccctttctttctccatggctcgcaccaagcagaccgcccgcaagttcaccggcggcaaggctccccgcaagcagctcgccaccaatgcggcgcggaagtcggcgccggccaccggcggcgtgaagaagccccaccgcttccgccccggcccggtggctttgagggagatccgcatgtatcacaaga

SEQ ID NO: 4889 - DNA, 142 bp, Lilium asiatic
tccactcgttcggaaatggtaaagccccttacctctgccgccgcctacaaaggtgccaagaagaacatgaagaagaaggatgctggtaacgacgccgtcgccgccgtcaaaattagtaagaagaccaagaataacatggatg

SEQ ID NO: 4890 - DNA, 336 bp, Lilium asiatic
gttggaactcaaggatgagaaactgaggcttaaggccgagaaagagcgggttgagcggatgctgaaagggatgactctagtaccaccgctagtatcgcatcctgctgccgcagcgtaccatgctgttgctttcgctgcttgcaacaaaaacatgccatatcggagcttgccacccatgggtatgtggcaatggattccgccaacatctttggatacttctcaagatcatgtgctaaggccgactgtcgcataattaatattctatcgaacacccccataaatggatcatttctgggtagcgccccaaaatggccaaaaaattaactgggggataat

SEQ ID NO: 4891 - DNA, 93 bp, Lilium asiatic
gttcgaacacaaggatgagaaaccgatgtctaaagccgagaaagaacaatttgagcgggggctgctggggatgactctagtaccaccgctcgt

SEQ ID NO: 4892 - DNA, 365 bp, Lilium asiatic
cccacgcgtccgaaggacgaagaagactcagagggaagaagagctctgcactttgcatgtgggtatggtgaggtgaagtgtgctcaagttcttcttgaagctggagcagcagtcgatgccttggacaagaacaagaacaccccacttcattatgccgcctgttatgggcgcaaggaatgcgtatccctgcttttagacaatggagcagccgtcaccctgcgaaacatggacgggaaaacaccaatcgaagttgccaagctcaacagtcaagaagagggggttggaagtgcttgaaaaaagagcccttttgtgagccggattaccggcaacattgattcccatgggtattccggaatttgggtatt

SEQ ID NO: 4893 - DNA, 398 bp, Lilium asiatic
gtagaaggttgagcgggccttgggaagttgagggaaccccgaaactgagttacagatatttgtgctggcattggcaaatgctggcacgataaagcctggcttgttcgggatactgtatcaaagcagatttacgagctttgagcagctgtgggtctcaaacctactatggcggatttggtgcctgcatatttacgggctttgggtaataatgaatccgaactgcgtataacatcggctaggaaggtggcataatgctgccgggtcttgaacccacaactttcaattcggcccatccttctatgtgtgacagatttgccgacacattcttgacaacacgtgcggtcagtattagcttctgtaatcatggggaaggcacctgtcttgtaaaaggatgcgac

SEQ ID NO: 4894 - DNA, 368 bp, Lilium asiatic
ttgataagttgtgcttagtgttcttattcaaaaaaacacggacatagagttatatgaacatataagtacaattaccacctgaaaatccccaacggccaaccagggccatttcgtagaaaaaaagacgctgtcgttcagcaagactaacgaggtatgctctacttcgggtgtggtgcattgtaccaaataagatattatcgtgacttggtttttgtctgtcattagccgagttcttacacgattactgttgtgttcgacttggatcgaaactatgtgcacttttatcggaaattgggggacggttaaatatcatttggagctggcttggctctttcttctcgagggattcttgggattttggccaacga

SEQ ID NO: 4895 - DNA, 244 bp, Lilium asiatic
cggactcgtgggtagggacatgcgccagactgttgctgttggggttattaagagtgttgagaagaaggatcccactggtgccaaggtgaccaaggctgctatcaagaagaagtgaggtgttcttcaatttatgtctgagtttcttaagatctgcaagagtctagttggtaatgcttgtttttgtttatcgaactttcgtgttgttaggtcagtggttttgatcaaactatttgctttgctgctc

SEQ ID NO: 4896 - DNA, 351 bp, Lilium asiatic
ctccaccaacggcgccggcgccgatgggccatcacctaagctccccaagctctcccacaatgagccgctcctgaagatcaagaagctctccgacaaggcggtggtgccctcccgagcgtctgccctctccgccggatatgatctctccagtgctgtggagacgaaggttccagctcgagggaaagctctggtaccgactgacctcagcattgccatccctgaggggacctatgctcgcatcgcacctcggtctgggctggcatggaagcactccattggtgttggagcaggtgttattgatgcagactatcgaggaccgctgggtgttgtatttgtcaacctttctgattg

SEQ ID NO: 4897 - DNA, 362 bp, Lilium asiatic
gggaagcagaacatcatgttcgctctcacctccatcaagggtatcggccgccgatttgccaacatcgtctgcaagaaggctgatgttgacatgacaaagagggctggcgagatctcagctgcggagcttgagaatttgatgactattgtggcgaatcctcgtcagttcaagattccggattggtttttgaatagaaagaaggattacaaggatggccgctactcgcagttgttctaagcgtgggaatgaactgaggatgatctggacctctaaggaaataaaggaataacgggggcttcgtcactaccggggccctaaaagtcggggtcagcacaccaagaccactggcagaaggggaaaga

SEQ ID NO: 4898 - DNA, 261 bp, Lilium asiatic
ccacgcgtccggtacccctcctcccccattggattgggggtaagaggtctcactccggcccgagtgggggagggcacattgttggccgtctttctctcggttttggaggaggcacattgagagagcatctacaagtgatttcggagtggagagttcatcatggttcttgtttgtgggtctttgttgagctttgagagagtcatgtaagtagagtttgtaaggtttgagtcttatcttatgatgaggtttttggttcggatt

SEQ ID NO: 4899 - DNA, 255 bp, Lilium asiatic
attcactactgctgaaatctgaagttctgcgacgcttccccctcccgtgtgctttctggcccctgtgattcaacggctactgttgaagctcaatctgccacatctgacgtgcctacaccaaacgtccaacatgaagatacaaaagatgtacacgccgtaaaagccacggaagaaatatcagtagagatgccaaaggtgggagcaacaataacaatcgaagctccaactgaacagtttgaagaaactgagatcacc

SEQ ID NO: 4900 - DNA, 82 bp, Lilium asiatic
acgcggacgcgtgggtttagtacacccatactttgcagcatcttatcgcgctcggaaaaaacgggcttattgtggcacctaa

SEQ ID NO: 4901 - DNA, 390 bp, Lilium asiatic
gggagctgtaaaagtaatggccaaagatcttattcgaacacggcatcagattaccaagttttatgcactcaaatctcaacttcaaggtgtatctctcagaattcagactctaaaatcaacacaagccatgggtgaggcgatgaaaggcgtcaccaaggcaatgggacagatgaaccgacaaatgaacctcccggctctgcagaagataatgcaggaattcgagcgacaaaatgagaagatggagctcgtctctgaggtgatgggagatgccatcgatgacgccttggaaggtgacgaggaggaggaagaaaccgaataactagtgaaccaaatccttgatgagatcggtatcgacgtaaactcagagcttgtcacggcgccctcatctgc

SEQ ID NO: 4902 - DNA, 371 bp, Lilium asiatic
cggacgcgtggggattaccttttcaagcttttgctgattggagattctggggttggcaaatcatgtcttcttctgagatttgcggatgattcatatatagagagttacatcagtaccattggcgtagatttcaaaatccgcacagtggaacaggatgggaagaccataaaacttcagatatgggatactgctggtcaggaacgcttccggacgatcacaagtagctactaccgtggtgctcatggcataattgttgtttacgatgtgacttgaccaaaaagcttcaacaatggtaagcaatggctgagtggagatgaccgatattcgagtgaaaatgtgaacaagcttttggtgggaaacaaaaatgattt

SEQ ID NO: 4903 - DNA, 131 bp, Lilium asiatic
gctcgaaggagaggttcaagagggagctggacgggattcaggtggaattgcaagcgactgaccctactgagatggacctcgatgtgattcgaggccgtgccaattaaggtactacctgtggtttcttacaa

SEQ ID NO: 4904 - DNA, 412 bp, Lilium asiatic
cccacgcgtccgcttctatttgctatccatgtgcagcatctgcagaagttgcaggaattgtggtctaccttagatgacatcgacaaggctctctgggttgtggatgcaaagcagccttctagtgcaatatcatataggcagattggtgttggagatgactgctatcttttgttatctcttgatgctcggaagccacggtctttaccagagtgccgcttttttggacctgattcggccgtaaatccgatgttaaagaaatggaagaaaaatggacgtaaatggacgagtgaaaaagcatttcacgaaaatcttgctgttatgctcgaaaccacactgcccagacctctgagtgccagctgcaaggatgacgagcgagtcgattgtgggattttgtatgctcaggatttgcctg

SEQ ID NO: 4905 - DNA, 264 bp, Lilium asiatic
ggaggcttataaggcgactctgctgaatcttggtggactcttcacgaagggctttgaggtgtttgcgagctacaagattggcaaggacagtaaactgactgaaaagatccttgctgccggacctaacctttgaagtcttggttcatgttggaatcaaacatcgtctaactgttgcgggttttctaccaaggggtttttccggcttcctttcgctagattaatgaaacaaaacatagatatctgattatggaactattaagctta

SEQ ID NO: 4906 - DNA, 281 bp, Lilium asiatic
cccacgcgttcgcttctatttgctatccatgtgcagcatctgcagaaggggcaagaatgtcggtctaccttacatgacatctgcatggctctctgggttgaggatgcaaagcacccttctagtgcaatatgatatatgcggattggcgtgggagatgactgcgatctcttgatatctctagatgctcgaaagccacggtctgcatgagactgacgctttgttggacctgacttggccgataatacgacgctaacagaaatggaggaaaaatggttgtaaat

SEQ ID NO: 4907 - DNA, 183 bp, Lilium asiatic
gccttgaccgtgacaagggatgatcagctcagtgcacgtgtctaacatgagcactatatgtgtggtgcttagaggaggtgtgtgcgccctctatgatgggacagtctattgatgtagtgtgtcattaagctgatatagtttgttgatcgtgcctaataggaacggggtataaacgtattgtta

SEQ ID NO: 4908 - DNA, 273 bp, Lilium asiatic
gcgaccctgaggaagctatgtgaacgctactgtgtgaaaaaccagaagcactatatcgtatcatagtattccttcgcagggtatttgatggaagtctgctgccatgacaggttttgcttgaccagattaatatcactaaattatttttattaaggactgactatagctgtgttgaagtttcggttttaaatagacggttgatattacaccgaattgtgtatcaacatgtatgatccaactccaagcttacattgcaagactattttttatttc

SEQ ID NO: 4909 - DNA, 150 bp, Lilium asiatic
gttatttagagtatgaggttgcatgtcctctgagtgaaaacaatgctagcgagaataatggatatttatatgtgcaaggtatcgttgcttgttattctgaatctttggatgtcctatgatatgtgatagattgaaatctgtgtatcaagg

SEQ ID NO: 4910 - DNA, 205 bp, Lilium asiatic
gatagagacgcctgcagatatttatgctgtaatggaatatgtcaagtccggcgagctatttgattacattgtatagaagggtagactgcaggaggatgatgcccgcccattttttcagcagataatatctggtgttgaatactgccatctaaatatggtggtacaccttgatctaaagtttgatatcttttattggattctaatt

SEQ ID NO: 4911 - DNA, 295 bp, Lilium asiatic
gagagatggagatccttcattactagcctctacgaggaagaggaaagaaagaggggaggatggtgggccccagtaggccggtgttcgttctcttcggctcctccattgtccagttcagcttcagcaatggcggatggggggccgctctcgccgatatctacgctcgcaaggctgatatctttttgcgtgggtattcttcttggaactcaaggcgtggtctagccgtaattgaccaagttgttcccgaatgatgcaccgggtgccaaccttaattagtgatttggctaattttggg

SEQ ID NO: 4912 - DNA, 390 bp, Lilium asiatic
gcttcatgggatgctattctcctgcacctccagttttgtccaagataatcacgccgactcttacaagaaaaggatggtagctgatggtggtggtgctgaactaaacaagtatctaccaattttaaaggctcacacagccagtcaccagcaactaatgtgctcggttgagggtcatactggtggtgctcacggcaaagaaccgatacataaagagtcccctaatggtcttgcattaaacttgatcagctcatctcctgatgctgatgtttgtcaacccaatttgatctcaggtaacttaaagctatcattctcgccagtgagtgacccgatgattgaagaaaatcctactggttcacaaaagtgttgcacgatcgaagaaatgcaagtctc

SEQ ID NO: 4913 - DNA, 214 bp, Lilium asiatic
gctacatgggatgctatttttctggagttgcagctttggacaagataagcacacctacgcttacaagaaaaggatgggagctgatggtgggggtgctgaactaaacacatatgtaccaattttaaaaggtcacacaggcagtcaccatcaacttatgtgcttggttgagggggatacttatggtgcttacggcagataaccgattcataaagag

SEQ ID NO: 4914 - DNA, 387 bp, Lilium asiatic
agtgtaggcgctcagagagtcaaaaatgtgtgtgtggccttccgcgagtattgccaggagggtaaccgagaaggatgtctgagatgcttgcaacaacttgagcaagagtgcactattctgaggagcaagcttgacactctatttaagctcgagcagcagattttggcggctggtggagcaataccgatgacttactagcggtacattgtgagtggttaggatcctgatagttggatgaccatgcttgctcttgtgctttgtttctgcgtcgtcatgtttgtcgtcagccatcgacttctttggcagtgttgaaaaaaggaactttggaaccagaagtaattgcgagctctttgtgcagttatgttacattctaatctggttagttat

SEQ ID NO: 4915 - DNA, 328 bp, Lilium asiatic
atctggatttcttgttgtggtacctgactttttctatggggacccatatgatcataataatgctcagagaccaataatgacttggatagaggatcatggtccggttaaaggatttgaagatgcaaaatcagttattgaagctttgaaagctaaaggcgtgtctgcgattggggctgctggattttgttggggtgccaaggtagttgccagcttggctaagtttgatgaccttcaagctgcagtgatgttgcatccttcaagggtcacggtagaggatgtcaaagagattaaagtaccactcgccgttcttggaagcgaaattgacaag

SEQ ID NO: 4916 - DNA, 283 bp, Lilium asiatic
cttgagaaaatgtgcagtggaaaaggctacattgacatgtcaacagttgatgcagatacttcatctaaaatcagtgaggcaataacaaagaagggtgggcaattccttgaagctccggtatcaggcagcaaaaagcccgctgaagatggtcagctagttattcttgctgcaggggagaagtcactgtatgaagaagtaattcctgccttcaacgtattaggaaagaagtctttctttttggggaaagtgggaaatggagcaaatatgaagctcgtagtcaaca

SEQ ID NO: 4917 - DNA, 330 bp, Lilium asiatic
cccacgcgtccgcccacgcgtccgcccacgcgtccgcccacacgtccgcggacgcgtgggaaaaaaaaaaaaaaaaaaaaaaaaaaaaaaaaaaaaaaaaaaaaaaaaaaaaaaaaaaaaaaaaaaaaaaaaaaaaaaaaaaaaaaaaaaaaaaaaaaaaaaaaaaaaaaaaaaaaaaaaaaaaaaaaaaaaaaaaaaaaaacccccccccccttctcttttataaaaacaatcacacccctttaaaagtaaccaaatattaatcccgcgtttatcaccaaaaaatcttttttataagttcaaaaaaaataaaaaaattgcccccttttt

SEQ ID NO: 4918 - DNA, 386 bp, Lilium asiatic
gccgtttccgtcgccctcgccgccgaagttcgccgccccagcgatggcgaagtcgaagaaccacaccgctcacaaccagtcgtacaaggcgcaccggaatgggatcaagaagccccgcaagcaccgccattcctccaccaaggggatggatccgaagttcctgaggaaccagaggtacgcgaggaagcataacaagccgaacggagcgtctgggtctgaggaggagatgcagtcatagattggttaagtgtctcaactgttttatctaggctatggaggataatgagtttctgttgtttggattagagttttgatgactctttggatattaaattcctggtttggttcgacctatttcagcttaattaaaaattacttttggattt

SEQ ID NO: 4919 - DNA, 305 bp, Lilium asiatic
ctcaacctgtggatgggcatccaggtcggcaaggcccgcaagaagtataaagtgttctatccgactctctatgcaatcgaatcggaagaacaaggaggccaagctcttcaattgtgttcagagagggcaccagaactcactggagatgatgccagcattctttgtgatgctgctggtcggtggatttaagcacccactgatcggggcagcacttggcctgttgaataccggggcaaggttcttttacttaaccggatatgcttttgaagtgccgaaaaatcggttcaggatcggggggctgaatt

SEQ ID NO: 4920 - DNA, 178 bp, Lilium asiatic
acggtcaaactggggatgggctgttcaggttttgttagggcccgcaagaagtatggagtagttgggagcgactctttgatgcagtcgaatatggagaacaaggaggccaagctcttcaattgcgttcagagagggcaccagaacttacttgagatgatgccagcattctttgtgatgc

SEQ ID NO: 4921 - DNA, 310 bp, Lilium asiatic
ggcttttctcaacccacctgccctatcttctcttgccaaaatccatactggaccccgccagtgactgcaagatcgtctacctctgccgcaaccccagagacactgtcatctcgttgtggcacttcttcaatggttttgcgtcaccacacgtgttcatcgagctggagcaggcggtggaaaacttcctggcggggacaagcttttatgggccgttctgggaccacgttctgggttactgggaatcaagtaaggcgaccacggagagggttcttttcatgcgctatgaggagatgttgagggatccgttagc

SEQ ID NO: 4922 - DNA, 238 bp, Lilium asiatic
gtctgccgctgctaagcccaagttcggtgccaagaaggtgaagaagcctgctgtgaagccaaagccgaaatcagctgctgtgaagccaaagcctaaatctcctgctgtgaagcctaaagcccctgctgcgaatccaaaatccaagcctgctgccccgaatgcgaagacaatgtctatatctaagactgcaggccgtccagcaaaggcggcatagacatttgtcaaagctgatctgtgg

SEQ ID NO: 4923 - DNA, 306 bp, Lilium asiatic
caacaccaccccagatatggagaagctcttcaggacgaagaggacctcggatgagatcttctttcctcctcccaactgaatcaggacaaggaacagctctcctgctttcttttaaataaaatggatacctcctactatagtttcaaagcttatgctttagtcttttatcggacttttttctattttaaaggatcaacttttatgctgagattgtttcatgcttgttagaatcatatcgagacctattttatagtgggtaatttttggtgggtcaattttaagtttggccattattggtatccgcct

SEQ ID NO: 4924 - DNA, 107 bp, Lilium asiatic
gacgaataggacctcggatggagatcgggtttcctcctgccatctgaatcacgacatggaacaactctcctgctttcttttaaataaaatggatgcctcctactatc

SEQ ID NO: 4925 - DNA, 305 bp, Lilium asiatic
cggacgcgtgggtgagtatgctgttgggcagctcaaggagtatgatggtaagaagcttgtctctgcgaccaaggaaggccttaagattgaggagaccgaggaggagaagaagaaaagagaggagaagaaggctgcatttgagggcctgtgcaagaccatcaaggagatacttggtgatcgcgttgagaaggttgtggtatctgacaggattgtggattccccctgtgtgctggtgactggtgagtatggttggactgctaacatggagaggattatgaaggctcatgctctgaaggacagcagca

SEQ ID NO: 4926 - DNA, 340 bp, Lilium asiatic
gcggaatgctcgggattcacacgatccggtgttggctccgcttccaattgggtttgcggggtgcatggattatcttgctaccaaccccatcactgggactggcatcaacccagcgaggagctttgtagcggcggtgatctacaatgatgagcacggcttgggatgatcagaggatgttctgggcaggtccatttatcaacgctgggatcgcttgggtttatcatcagaacatactcagggctggggcgaacaaggctctcggatcctaccggaactaagcctgaccatgtaccctgttaatggttgtcaacgaattaacagtagatgaaagaccacattt

SEQ ID NO: 4927 - DNA, 367 bp, Lilium asiatic
gtgatgccgtaccatagtcagagggatgaacggaaccgtggcggggactacaggcgtggcgggggtccgaggaatgaggataggcatgggcggtatgatatggatggcgggaggcggtatgatagtgatggtgggaggcggcatgatgggtaccgcgggagtcctgcaaggcggacaaggagcccggtgagagaagggagtgaggaacggagggcgaggattgagcagtggaaccgggagagggaggaaaggcgctgagcagaattttcaatctcttatggatggagtatggagtgctgttgggtcttttctgttagattgttggcgtcaaagtgatttggggtctatactatttatgttgcattgt

SEQ ID NO: 4928 - DNA, 298 bp, Lilium asiatic
ggtatttacacatctatggatagtagtgttcttcctcctctccatataatttatgctgaaaatccaagtgattctgggacggtgcacagcacggttcgcaagaggtggctagatggtgatgaatttataatatcatctatggaagaagctgcgaaaatcgccttagaaggttatgatgctttactcgaaaaaaactatactttaggtgctgacttgattaacctcaactttgatcttcggaggaagatgtttgacgttgacgtccttgggtactttaaacatcaacatgcttcgagtt

SEQ ID NO: 4929 - DNA, 408 bp, Lilium asiatic
gctgaagccaagaagttggcgggtagatggagacgggtgaacctcttcgccgccatctctgagatcggtacctgcagaaagagtgaagggccggactatgtgctgacattgaaaatagtggaccaatcatatccgactccaggacttacggtgtccatgtttgcggatacaccatctaagttgccagatgtcagttcaggtggagatattgtttgtctccgaggagcattgatgagagtttacaatggcgagtacttctgtagcttcaacaagcagtccggttcatttgcgctttttgaagggaaaactggtgtgggcttaagcccatatcatacttcgacgacgtatcaagccgctgatcttgacgacgaaattctatttcaactaagaacatggctacgtgagcat

SEQ ID NO: 4930 - DNA, 335 bp, Lilium asiatic
gcccttccccttttcctttcccctcaattatcaatttccgaaaccctaacccttaatcgttgctccgatggcccgtacgaagcagaccgcccgcaagtccaccggcgggaaggccccacgcaagcagctcgctaccaaggctgctcgtaagtcggcaccgacgactggcggagtgaagaaaccccatcgctacaagcctgtgacggtggcgctccgtgagatccgcaagtaccagaagagtaccgagcttctcatcaggaagctgcccttccagaggctagtgagggagatcgcgcaagatttcaagaccgatctccgtttccagagccatgccg

SEQ ID NO: 4931 - DNA, 275 bp, Lilium asiatic
ctgagcccaagtccccaaagaaggccaccaaatcgcccaaaaaggcttaaatgagttatcgagttttctaatgtatgtacctagttccctaggttcttgttttaatttggtagtttaatgtcatagttatcttgacttagtagttctttttcaatatatggtaccgtttcgtctaaaaaaaccaaattgctacaatcctgaaacagatgcgctacgttaagatacgtaattaacaggggaataacaatcataaaagggcggccgttttaaaggtt

SEQ ID NO: 4932 - DNA, 417 bp, Lilium asiatic
gcatgagttactgtttgcagaaattgagttcagtcagaaaagggaggtggagcttcaaagtgacaacatgtacctgagagctaagatagcggataatgagcgaactcaagcagctatcgtgcaagcaagggctgagttcgatgcgcttccaacatttgattccagaaacttctaccaggtcaacaacatgctggaggctccaccccactatcatcatcaggatcagacagcccttcatcttggctacgaagccaaagacgattcagttccatgaaatctaagagggtgtactagtcatataaattccacttaagtttgtgttgtaccttttgaaatatttgtctgaaccctgtgtgattactaccattcctgatgtcattaggcatcttgaaatatgtcttgcttttagtaatatac

SEQ ID NO: 4933 - DNA, 396 bp, Lilium asiatic
atgggtgcttggagctccggaaattttagggtttttctactggaggtgtgggtttcgatagggccgcattggtgcttgcttcatcactaacagagtgtgctgcggaataggtgtcatggacagtagtgtcattgaaggcctgataaacaccatttctcgatatattcatttagtggcttgccaaaagggtagtattacagctttaaaagacttcagaaatatatttggcatactgaagcttttaaggcctgtacttgacgaggcccttgaatctcaaattccactagatgaacaactcattaaagcttttgaggagctagacctaactgttaatgaggcttgagattctataaagaagcggtcactgaggatgagcaagatactgaatgttttgca

SEQ ID NO: 4934 - DNA, 376 bp, Lilium asiatic
ccggcccgagtgggggagggcacattgttggtcgtctttctctcggttttggaggaggcacattggtagagcatctacaagtgatcttggagtggagagttcatcatagttttttgttgtgagtctgtgttgagctttaagagagtcatgtaagtggagtttttaaggtgttagactctgtttatgatgagtttttggttcggttttgtttactttaatgatggtctttgcctataatggtttttgtgttctagtgtagtcctttcattgtattttatttttatcctctaatatttaaaatgtcttttatttgttcttatttttctaattttttttatatctctgataggttgccaatttattccttctttttttg

SEQ ID NO: 4935 - DNA, 308 bp, Lilium asiatic
gaaattaagaagaagacactccaaattgagagcatgtcaactaaggttgaggagatggaacggcttgcccatggtgcaaatggtattctgaacgagatgcggcagaaggtcgaagatatggtgctagaaacttcaaggcagcggcagcgagcagcagacaatgagcaggagctttctcgtgtgaaacaagatttcgagtcactgagatcttatgttagcagtctcatcagtgttagagaaacccttccttcttcagagaaacaaatttcagacaatggaaaaaccttttgacaggtttatttgaaaaa

SEQ ID NO: 4936 - DNA, 316 bp, Lilium asiatic
cagacctgaaacttcaaataccaaatcccctcttttcctctgatggcgcccaaggccgagaagaagcccgcggagaagatgccggtggcggagaagcctgcctccgaggaggagaagaaagctgccccagccgagaagaagccggcggaggagaagcccaaggccgggaagaaggtcccggcctccaaggggggggagaagaagaagaagaggtcgaacaagtcggtcgagacctacatgatctacatcttcaaggtgctgaatcagggacacccggacatcggtatcttcagcaaggccatggggatcatgaaca

SEQ ID NO: 4937 - DNA, 314 bp, Lilium asiatic
ccggcccgagtgggggagggcacattgttggccgtctttctctcggttttggaggaggcacattgggagagcatctacaagtgatctcggagtggagagttcatcatagttttttgttgtgagtctttgttgagctttaagagagtcatgtaagtggagtttttaaggttttagtcttgttttatgatgagtttttggttcggatttgtatacattcaaggatggccaaggcctagaatgggatttgagttcttgtgttgatcttccattgtagcttaattcaaccttcaataatgaaatgcttttattgttca

SEQ ID NO: 4938 - DNA, 56 bp, Lilium asiatic
cccacgcgtccgcccacgcgtccgaaaaaaaaaaaaaaaaaaaaaaaaattaaaaa

SEQ ID NO: 4939 - DNA, 412 bp, Lilium asiatic
  modified_base (352)..(352): a, c, g, t, unknown, or other
ccacgcgtccgcagaactattataatgtgtatggaggggcagccactcaatatcctgctacttaccacccatactaccagttcaaccaaagcgggggcggcgcagccccatacatctacggtcaaggttatggcatgcagtatcctcagatgtaccaaaattcgtcaatggcttcagctacaggagtgacagggtttgcggctcaacactttggaggagcaatgtcgattgcaccaaatgtcccagcaccaacaggcatgaccatggccctgacaactccagctctgcctagtcctcattacaggctcgtcccttcttactttactacaccgactgcacgcgagcaaccctngacttaaccatggttaatttcccttctctcatttcttcctctctgctttttcgatcactc

SEQ ID NO: 4940 - DNA, 397 bp, Lilium asiatic
aagaagaagaagaggtcgaagaagtcggtggagacctacaagatctacatcttcaaggtgctgaagcaggtccaccccgacattgggatctccagcaaggccatggggatcatgaacagcttcatcaacgacctcttcgagaagatggctcaggagtccgcccgcctcgcccgctacaacaagaagaacaccatcacctctcgcgagatccagacctctgtccgccttgtccttcctggcgagctcgccaagcacgccgtgtctgagggcaccaaggcggtcaccaagttcaccagcgcttaggcttatgcttaggttgtggtctgttcgggtttgtaaattttagctgctatcaatatggtttcgattttttgatcgaaagcttattgttattttc

SEQ ID NO: 4941 - DNA, 422 bp, Lilium asiatic
agtaatttctcttttctgatgcttgccgcttatttctctgctctgatccttggtttcgtttctcctctcttatgttccatctgttgttttcttatgttcatctgtggtttgatggttaaggtcttgtgacttgtgtccttttaaatactggttgaataataagttctagatttggtttataaaaaaaattaattacttatttttgtttttctttttatattgtggttgttttttttgtgtctgtttctttgtttgttcttttttatttcttttcggtctcttttttacttttttctctttttttttttgtgttctttttcttttgtcaatatattcttttttttttttttttaactatatttatatctctgttttttatccattttttttttttttccccatgtttttttgtttttattttt

SEQ ID NO: 4942 - DNA, 85 bp, Lilium asiatic
aaaaaaaaaaaaaaataaaaaaaaaaaaaaaataaaaaaaggacgacaagatctaggggatcggggcttacgtactgctggcatg

SEQ ID NO: 4943 - DNA, 275 bp, Lilium asiatic
aaacggttttattattactttaatttaaatgattggggtatgggtttattttttttatattttttttttttttttttatttttttttttttttgtttttttttttttttttttttttatttttttttttttttttttttttttatttttttttttttattttttttttttttttttttttttttttttttttttttttttttttttattttttttttttttttttattttttttttttttttttttttctttttttttttttttttttttttttt

SEQ ID NO: 4944 - DNA, 377 bp, Lilium asiatic
ctttttgagatcaacgaggcttttgcgtctcaatttgtgtattgtgccaagaaattagagcttgatccatcgaagataaatgtaaatggaggcgctatcgctcttggacatcctttgggtgcaacaggggcgcgatgtgtgagtacccttttaaacgaaatgaagcgcagaggaaaggattgtcgtttcggtatcgtctcgatgtgcataggctctgggatgggtgctgcagctgtcttcgaaagaggcgatggagtcgatgagcttactaatgttcggaagatcgaatccaacaacctgttattaaaggatgccaagtagaagccaaattcaagactaaagtggaagggactagcccgttcttattaagtgatttt

SEQ ID NO: 4945 - DNA, 434 bp, Lilium asiatic
tgacatcagatctggcgacgggcttgttacagatgacaagaataatatgcagatgcaagaagttgacgctcaaggagatgcttccgatagtgaaactacccccaaaaatgcctctgatgagaaggaagatcagatttccactgatgaagttccaattatcccacttgctaatggagttgagaaaattgctatgccaactgaagatgcaaaagtgaaggaaatcggaaaccacgaaagtgatgcttctgatactgaaaatacagacaactcccttacaaaagcaatgagtgaaagaggatctgaagacgaagttggtagtttctctaagagtgacgagcaaaacaaatcgcagattccaaaccgatagactcccgagatgggagtgattgaatctcaaggagttggtgtttctgagacccaaagtacaagtgatg

SEQ ID NO: 4946 - DNA, 207 bp, Lilium asiatic
tgacatcagatctggcgacgggcttgttacagatgacatgaataatatgcagatgcaagaagttgacgctcaaggagatgcttccgatagtgaaactaccctcaaaaatgcctctgatgagaaggaagatcagattttcactgatgaagttccaattatcctacttgttatttgagttgagaaatttgctattgtcattctgattat

SEQ ID NO: 4947 - DNA, 180 bp, Lilium asiatic
gacaccctcttcttcccatctctcacacggtctcttaccccctctttctccgttgatcgccagcaaaccctagatccgatcagatccgccatgggttttctggcgacgacctttatctttattctcggcggctttattggcttcctcttcgttcgggtcttgttgtaacacgcggggccc

SEQ ID NO: 4948 - DNA, 336 bp, Lilium asiatic
ggagatggcacacttgtatgagcgcagaaaatttccatacccaggtgacactgaggccgtcgaagagttcattgcgagggggggcgcccttggcaccaccatcggtcccaaagggattatcgactctggcgattccgacaactttcagaaacaactgcagtcgaagaaatttgatcaggaagcccagaagatgtggttccgcatgaggaacgaggtcatatcggaactccaagagaaaggtttcgatatctagtgaaagttgttgaagccaaagaaatgccgaactgctatattttggtgcaatatagctacaatttgtatagcaatgttcttgtt

SEQ ID NO: 4949 - DNA, 195 bp, Lilium asiatic
attggtgatgattattttgcctcgaagctgtaagatgttgtagacagtcacatctggattgtatcagagtattatgctgcttgtaatagcatgttttagtgtgtactatgatgtaatttcgaagaggtgcaaatcgaatataatctcctgtatatactctctttgtgcatgttttatactgatgccttcagaggt

SEQ ID NO: 4950 - DNA, 272 bp, Lilium asiatic
attggtgatgattattttgccttttagctgtaagatgttgtagacagtcacatcgggattgtatcatattattatgctgctcgtaatatcatgttttagtgtgtactatgatgtaatttcgaagaggtgcatattgaatataatcttcttgatatactctctttgggcaatgtttatacttatgcctttccgagattatatattatttaatattgttttttttttatgggctgctcgttttattggattcatgcttatcgtactctttgcat

SEQ ID NO: 4951 - DNA, 283 bp, Lilium asiatic
cccacttaaaaaaaatgttaaatcattgacattaaactgtagattcttttacccatcacaggcaccttcattgcagtccaccacatggtcatcggaggagcaggagcttgaagagccagattccatctgcctcctttgcaaagagcccagaatctcaccaaccgaacttggctcagttggtaggcggactcgtcccgggaccgcactcttgacagaggtcaagaggtctagtttgaatcctataacaagtagggtggttggggattacttttacgcctctttg

SEQ ID NO: 4952 - DNA, 272 bp, Lilium asiatic
cggacgcgtgggcggacgcgtgggcggacgcgtgggctgaggtgagcatccctgaagatctggctgttcgggtcgcccttggactgagatacgagatcaaccgtggctttgcttttctgaggagtgttgcgtctggacgagatcttaagaagttccttggtgtgattgcaggattatgggtgctatcggttgttgggagctggtgcaatttcttgaccttgttgtacttagcattcgtgtgcctttacaccgtgcctttcctgcatgagaag

SEQ ID NO: 4953 - DNA, 277 bp, Lilium asiatic
ctttttgagagcagaccaggctcttgcgacttaacaagcgtattgagccaagcaatcaaagcgtgatccatcttatataaatgcaaatggaggcgctattggtcttggacatactttgggtgcaacaggggcgcgatgtgtgagtacccttttaaacgaattgaagcgcacaggaatggattgtcgttttggtattcatacgatgtgcataggctctgtgatgggtgctgcagctctcttttaaagaggctatggatttgatgagcttactaatgtt

SEQ ID NO: 4954 - DNA, 377 bp, Lilium asiatic
aaaacttgatgctttgtaaaagtttttatcaccattcaaacaacatacatctatcacatactcttcaactatatctcattcaaactgaacactaacataatctaacacagataggggacatagaactcacaatcgattgcagaatcaagagaataaaaactagaaccaagaggcttaagaatcttcacagcttcaaagtctcaacatcaatgaaaatctttatcgacaaccctgaactccataacacactttaccgactccttgctcgatctttgaagagatctaagctccaccgctaacttccgaacttgtccttacagggaggaccaagtaccagcttagctctttccggactcatttttatcgacaaccctgaa

SEQ ID NO: 4955 - DNA, 264 bp, Lilium asiatic
ggatcgcccagctcctcggctccacagtcgcctgcttgctcctccgctacaccaccggcctgcccaccggtaccttcgcccttgttgagggagtcagcgtctggaacggcctggtacttgaaatcgtcatgactttcggactggtctacacagtctacgccaccgctattgacccgaagaagggtaacattggtaccattgccccgatcgccattggtttcatcgtcggcgctaacattcttgtcggtggggctttcagcggtg

SEQ ID NO: 4956 - DNA, 323 bp, Lilium asiatic
gacaccgagttctacccagctctcacacggtctcttacccactgtgtctccgatgatcggcagcaaaccctagatccgatcagatccggcatgggtatcctggcgacgaccttgatctttatactcggcggcttcatcgcctgcctctccgtacggctctgctgcaaccgcggcccctacacgaatctgtgccatttgactctgggtataacggcaacttgtttgttgttggaagatctgggcgattggatatttagcacagcttgaacccgttggtcaatccgatccttaccgaaggagattgatatactcatcataacaac

SEQ ID NO: 4957 - DNA, 243 bp, Lilium asiatic
agcctctccctctctccgtcatgaaccccgtccgcccggccgttgacgaagtccggacgatcttcatcactggcctcccggccgacgtgaaggagcgggaactccagaacctacttcggtggcttccgggttacgaggcgtctcacatcaacttcaaggaagagcaacccatggggttcgccctcttcttcacttcccagaatgcattgggccgccaaagcggcctgttagaactttgctctt

SEQ ID NO: 4958 - DNA, 348 bp, Lilium asiatic
cgtggattgaccaagatgatgcccgacacagctttgggcattctggaggattcatttgcccctttattccactactgcccatctgctgcatcctgataaattcttacttgctggtaaatctcggtgttggtacatggttgagggtatctgtatggctgatcatcggggttctcgtgtatctgttctatggacgaaggcacagctcactcactaatgtgatctattggtcgggtggcccatgcagatgagtatttatgggacttttttcgtgcattggggcttagattggaggttttattccttcatatattgggggaaggtattttatccattaagtttcattttttt

SEQ ID NO: 4959 - DNA, 282 bp, Lilium asiatic
gaaagacaagaagccagaagctatggcaggagactctattccaggtgagcaggttcatcgtgtggttgagaaacctgaagagacaaagaatgtcgactataatcctcgatcaccggagccagatagtcagatgttaagcaatgatggtcggactggtggtacatatagcggttacaatgctcgaccatcccaacaagggcaagctttgcaaagttacggaagtggttacaatgctcctcaaccatcccaacatgggcctttgcaaggggagagccagaaaca

SEQ ID NO: 4960 - DNA, 139 bp, Lilium asiatic
gccatacttccttgtttacaggaattggaagttacttatgatgcgtctgtagaggatactgggtggtcctaccttgacccgggtgatgaacctatgggttctttgtgcctaaaatataggttaaatattctctatactt

SEQ ID NO: 4961 - DNA, 393 bp, Lilium asiatic
cccacgcgtccgcgaagaagtcggtggagacctacaagatctacatcttcaaggtgctgaagcaggtccaccccgacatcggaatctccagcaaggccatggggatcatgaacagcttcatcaacgacctcttcgagaagatggcacaggagtccgcccgccttgcccgttacaacaagaagaacaccatcacctctcgcgagatccagacctctgtccgccttgtcctccctggcgagctcgccaagcacgccgtctctgagggcaccaaggcggtcaccaagttcaccagcgcttaggcttaggcttaggctttgggtgtgttctgttcggtttttgaatttttagctgctatcaatatgtttcgatttctgatcgaaaacttcttggttt

SEQ ID NO: 4962 - DNA, 185 bp, Lilium asiatic
cccacgcgtccgcaaaaatggctgagcaccacaagcaccacctcttccaccgccacaaggacgaggagaacaccggtgaggaggccccttacggcaacaccgacggctacaacactggcaacaccggttataacaccggcgacggctacaacacttgcactaacaccggttacgacaccggttac

SEQ ID NO: 4963 - DNA, 212 bp, Lilium asiatic
cgtgggcggacgcgtgggcggacgctagggctgacgcgtgggcggacgcgtgggcacaactatcttcgagaggggtgacctcgatatcttcagcggccggggaccctgcctgtcgtcgatgccttgctccatcaaagtctcctcagacggcaagggacaacaccatggttggtactgcgacttcattgaggtcaccatgtctgggtccgcat

SEQ ID NO: 4964 - DNA, 226 bp, Lilium asiatic
  modified_base (16)..(17): a, c, g, t, unknown, or other
  modified_base (24)..(24): a, c, g, t, unknown, or other
  modified_base (41)..(41): a, c, g, t, unknown, or other
  modified_base (120)..(120): a, c, g, t, unknown, or other
gggccgacccacgcgnncagaaangagaagggagggaaaanggcaacgcttttagacgcaccacagaaggagcacgaccggggaagaaaaaaggggaagcggagaagacacacaccaacnggaaagccggccagacttataagtgggatatacaaaaaatagaaagagacatacacacatgaaaaggacatacgtatatgggtaatactcgcctaacaacaatgaa

SEQ ID NO: 4965 - DNA, 351 bp, Lilium asiatic
ggactttttcaatggtaaggagttgtgcaagagcatcaaccctgatgaagcagttgcttatggtgctgctgtccaggctgctattctgactggtgagggaaatgagaaggttcaggacctacttctcctggatgttacccctctgtctcttggactcgagactgctggaggagtgatgactgttctgatccccataaacaccaccatccctaccaagaaggagcagggtcttctctacctactctgataaccagtccggtgtgttgatccaggtgtatggaggtgagagtaccatgactcgtgacaacaatctcctcggtaaatttgagcttttcggcttcccttctgctt

SEQ ID NO: 4966 - DNA, 303 bp, Lilium asiatic
ggacgtcaagagaggagaaggaacatattgtgagaaagctgtcacctgcagtccatactatgtctcacaacacacatactccaccatcactatccaccccaagtgatcactatccatccatggaggggagaacttgcaagccaaccgagccagaaaagttaatacctcatacctacgttagatttgattgacttcctaactattagaaagccaggttgaaatggaaggtgaagagaggatggatcaaaggacagcttctttattcaatccgttaaaaatgataccaagggattttttcatgga

SEQ ID NO: 4967 - DNA, 373 bp, Lilium asiatic
gctggaagaagaagagattgggatgtgctaaagagcattgtctacggcggtttaattgaatcagttacaagcctttctattgtatcctctgcagctgggggcaatgcttcaacactaaatattattgctttggcgttagcaaatctgattggtggattattcatgattgctcataatatttcggaacttcgaaacactcaggaagaaactaccagtcaaaatggtgagtcagtcggtcgctactgggagctccttgggaggaaagcaaattctcggctacatgtaactaatcgcaatgctatccgtatatacttattgggtctttcttcccctaatatttaacggtttcctccttccggaaaggcgccaccaa

SEQ ID NO: 4968 - DNA, 278 bp, Lilium asiatic
gccagattctccacttggaagcatggactctcatccgaagctagctcaagtgatcaaggtgataggtcgaactgggtcgagggggcttgttactcaagtgagggtcaagttcctaggcgactcataccgcatgttcatgatgaatgtgaagggtcctgtctttaaaggtgtctattctctctgttctcgatttttgatcgtgtattctgatgacttcgctagttatattattcttgttcctttttaattttaaattttttttgtttctttttctttta

SEQ ID NO: 4969 - DNA, 409 bp, Lilium asiatic
  modified_base (401)..(401): a, c, g, t, unknown, or other
ccacgcgtccgattagcccgaaattttaatagtagattaaaggatcttgtaatggagcttagttcatctcttccaggagtgcagtttgcatatgggaatgcatatggcattgtatctgatatcattcaaaattatagctcatatggtttcgaagttgtgaattcagcttgttgcttcgttgcggggcgatacgggggactgataccttgtgggccgacttcgataggtctgcccggatcattcgaagtacttcttttgggacccttaccatccatctgatgctgcaaatgttatcatagcgaagcgattgctcgatggcgattccaacgatatatttcctgtgaatgtgaaggcacttgcacaagaatgaggcttcatttgaagaattggcattggggaanaatggagc

SEQ ID NO: 4970 - DNA, 308 bp, Lilium asiatic
gtcgaacctccttataaaggcgggccgatcttgggtttccactccgaaaattgggatccggcgaagaaatcgagagctgattctaatccggtaaaagatgggtcaggtacttggttgctatcaagtggaccagtcaactgtagctatcaaagaagctttcgggaagtttgatgacttgcttgagccaggatgccacttcttgccatggtgtttagggagaaatgtggctggttatcttttcgctgcgcgcgcagctatcttgatgtttagctgtgaaacataaaaccatgggacaattgtgttttgtg

SEQ ID NO: 4971 - DNA, 417 bp, Lilium asiatic
  modified_base (402)..(402): a, c, g, t, unknown, or other
ggggtcagctgctgccttagatcggaggtgatggcgggggagcagaagacgatctatcactttgatgaggtctcaaagcacaacgctactaaggattgctggctcatcatctccggaaaggtgtatgatgtcaccccatttatggaggaccatcctggtggtgatgaggtcttgctagccgcaacaggtaaggatgcgacagacgatttcgaagacgtggggcatagcacatctgctagggagatgatggacaagtactacattgccgaggttgatgtgtcaagtgttcctacaaagcgtgcctactttcaaccccagcatacaccgtacaatccttataaaacttccaactttgtgaccaaaaaactgcaatttgcagtgccgttgctgattttaggttanccctttggcggccgt

SEQ ID NO: 4972 - DNA, 284 bp, Lilium asiatic
gtttttctcaccttatgagtatcggtgtgtcatatataacaatgctaaggaagaacaaagttgtttcccttaggcaatgatctccatgctcattttggggaagtactaagtgaccatagatgtcaaagagttcgcggtttcatactaaggctctgttaggtgttgatgcttgtcaatagggctttaatacttggtaatgtcagttggagaggattagcacaaacccgagagatttcggcttcttccggtgacttaacagttgtgtatgttgatgtaaattagca

SEQ ID NO: 4973 - DNA, 302 bp, Lilium asiatic
cccacgcgtccgcggacgcgtgggcgccgtctcagacgtccaccgccgccgcttagcctccacctaccgtctccacctccgtctccctcctcaggcgtccgtcaccgctgctcgccccttcaagttttggttgcaactgcaagcatgaggaggcttaagttccatgagaggaaacttctgaagaaagcaaatcatcttgtattcaaaacagaaagtggtcattgagaagctcttgtcaccggcgcttgcgcttccaccttactggtagagaagattacaaggagtatttttgtattgcacag

SEQ ID NO: 4974 - DNA, 303 bp, Lilium asiatic
gaggaggcggtggtggaggcggtggcgcctgctactcctgtggtgagcagggtcacatgtctcgtgactgccctactggcggcggtggcggtggcaggtatggcggcggtggaggtggaggtaggtttggaggaggtggtggtggtggcggcggcggttcctgctactcgtgcggtgagtctggccacttcgctagggagtgcccgtccaacagggggtgaatacctaacctgctctatttttatgttgtctctagggtttgcgctatgtttttgacccgtctcatatgaccaagttgtgttt

SEQ ID NO: 4975 - DNA, 370 bp, Lilium asiatic
ggcgatgccggtgaggcgagggtaggagaagcggctcgccatggtttctctgtcgacgtgggttcgctacgcagcacacaagttcgagtactctctcaccctcagctggaagagacaaaatgttagccaaaccaatgtgagagagttgagtgagataagcgactctctctggaagaactttttccaaggcaagatgacattcttgcatcggaataaaggagaagcgatggaaacaccaattgcacaacatgggggaactcttttaattagaaagctgccttatccagatacaaggcaactctatgttggagatgttgttttgttaaaagaccctgaaaggcaggatgatttttttgttagaaggctgttt

SEQ ID NO: 4976 - DNA, 328 bp, Lilium asiatic
acgtcatcctcctccctcctctcccaaatcgaagtatcaacaatgatccaactcccgaagctccggactccattagatcgtctggatctggttcgatctagctatttacttggattaattgcttgataattgaagagaagctggattctttgtactctttcaactgattggctaagtatatcacatatatggtatatctttcccctcaatctctttagctaagtggatcctctgaaaataatattgccgctcaagctttattattgatagttttggtgtgacttgtttgagtagtatggtttaattattaggttttaacctggttatt

SEQ ID NO: 4977 - DNA, 372 bp, Lilium asiatic
ctccattggaatctgaggaagagccagtcgtatgatggcccccgtgatgcatagaccagactgtgtcgttactccaatcgtatgatggcccccgtgatgcatagaccagactgtgtcgttactcaagtagtgaatcctgcagcatcgcaggctgtggcttcaatgttgttgatttacttacaaatttattttatgtgttagggtatcggttttttttagagtacttgtagcagttgatcatagtggagggtaacattgtcattatccctaaggtatgtaaaaatgtgatagattcttaaaggggaattttagatcctaaaaatgtggataaattttttaaatgggaatttattaacaggtttttttaaactt

SEQ ID NO: 4978 - DNA, 256 bp, Lilium asiatic
caacattttgagaaattttgtttcttataggagtgttgaaagttaccttgatcaacagaggcagaacaaggtggttaatatgatgtcccccttatttctgatgtttatgtttgacgcatggcatcaggatatctttcttttttcatggaagatagtagtttgaggatggtattgaactttgttgcctaatcttaatgagctatcatcatctttatgcaattgctaatagtggtaggttgttgaagaccttcaagtt

SEQ ID NO: 4979 - DNA, 315 bp, Lilium asiatic
tgggaatgaaaaagaagggagtagatgagtttcctttctgtgtccatcttgttagctgggagaaggagaacgtgtccagtgaggcactggaagctgctcgtattgcctgcaataagtacatgaccaagtttgctgggaaggatgctttccatctaatgtgttgagtgcatcctttccatgttctcctgtttaacaagatgctttctttgtgctgttgcctattgtctttatactgttattgagagtttctttttggttaattctttattgtatctttttgctttttgatttgctttatttttatgttcttttttt

SEQ ID NO: 4980 - DNA, 158 bp, Lilium asiatic
cggacgcgtgggcggacgcgtgggcggacgcgtgggttaaaaaaaaaaaaaaaaaaagacgaggcagttttgttcggccgctttatacaatccaagaatacgatcgcctgcttgctagatcttacctgattaagtgtggagtaaatcgtcaattactg

SEQ ID NO: 4981 - DNA, 223 bp, Lilium asiatic
ccaattccctcatttcaacccagagagagctgaagagattgaatctggaaagatagccaagggtgctgccggccgctagggcggctcatggaagaagtccgttccaagatccatcaaggctgtactccaggttccggtaggtcgcattggccgttacctcaagaaggtcctctattcatagcgtgtacgttctggagctccatgttaccttgccgtcttgctc

SEQ ID NO: 4982 - DNA, 353 bp, Lilium asiatic
cggacgcgtgggcggcgtttcccacgccctacggagaggtgaagaggatctccgtatcaactgggcggagatgcgtgaggttcggcggtgggatgaggagatctagggtggcggtggcaggggcggctatggaaaagggcaaaggggtgaacaactcgaactatgtagttcccctcgacaaggctagttccggaatcacccgccccctcgccgaaatccttcgtgacctcaacaagcgcgttccggacaacattattaattacaacacaatcccttggtatcatgtgaacagaatgctgagcttctacgccccaatctgtgtcggtgaaatgcgtgattttatatactcagag

SEQ ID NO: 4983 - DNA, 287 bp, Lilium asiatic
ctctctctctctctcaaataatgccatggttctgctagagtttttcaaacaaaagcaaagggacaagtaaaacccttgagcgatatcagcaatgttgttacacatctcatgatactaatgccataaatcaggaaacacagagctggtatcaggaaacttgtaagttgaaggcaaaagtagattccctccaacgttcgcagaggttattttcctaacaaccattatttgcaaagttttgtgtagtatcataataaaaaaaaataaaaaaaaattcactgactagtatt

SEQ ID NO: 4984 - DNA, 409 bp, Lilium asiatic
catgatttcatattgaatcaattccatatcagtttgaaattaaataataaaaatgttatggtaaaacttcgtttgaaacgatgtggttgaaagcaacgtgcgacttgaaggacatgattgactgtggattcttacatccaccattttctataagaatgaagatgctcttggctcgacatagtttgttctttttactatgaacctaatttgtgttgggttctaatctaaataaaaagtacatgatgaaactcgagcagaaagtattgagattcatttatcggggggaagaatctagggttagtgacaattataaatcaataagttgaaccaacttttgaaatatatccccgataatataaatttttaatatataaggatcaattatattaattgaaaaagctttaaattc

SEQ ID NO: 4985 - DNA, 274 bp, Lilium asiatic
acacccccctctccccgtcgtcccttccgatccatcgccggcgcagctatgtccgccccccaaagccaagccagctctctccagcgccttaatcacgtcgagaagcggatcgtcagggtgctggaactggccggattggtgatggatgaactcgccaattccaccggtccgcggacggtcgcccttgactcccactgccgcgagttcatgcaggccatcagggaaattcaaacgacattgcgtgaagaaatcaaaagtgcgtgtgagttttgcc

SEQ ID NO: 4986 - DNA, 405 bp, Lilium asiatic
ggtggcagcgcctgctgcagaggagccgacagtagaagttaagaaggccgaagaggctgctgatgtggtagagccggaagctacacctgaaccagcagtggagacagctgtggaagagacaccgaaagaagtagcacccgaagcttcggcggcagaaccagaggctgctgcggcagctgttgaagatccagctgctgtgacggcagcattcgaagagacagctgctacagaagctgctccttcagtagaggaaggcaaggctgaggaggtgaaggaggctacttcagtgtgattagcattttgggtggcttgtgccttttgtttgggagggggttaaatagggttttgtgaaaaatattggaagggagggggggttttttaatgaatttaaaggttttggttttt

SEQ ID NO: 4987 - DNA, 282 bp, Lilium asiatic
gctggacctggtggtggtagaggtggtggcaccagaggaggtggcggtcgtgggcgtggttgataaagaagaggcattgtgacacctgaacttcggttggtttttttttttcctatatatttcccgtcgctttactattttgaaaatgtggagggaagcttgctttagtagtaatatctgttgctgtagatgaaaaggaatgatcggtttgggtaaagcatattattggagtatgtgagtttatgagattggtggtttctaatatatattagtatttatctt

SEQ ID NO: 4988 - DNA, 289 bp, Lilium asiatic
gcagaaattgagttcagtcagaaaagggaggtggagcttcaaagtgacaacatgtacctgagagctaagatagcggagaatgagcgaactcaagcagctatcgtgcaagcaagggctgagttcgatgcgcttccaacatttgattccagaaacttctaccaggtcaacaacatgctggaggctccaccccactatcatcatcaggatcagacagcccttcatcttggcttctaagccaaagacgattcagtttcatgaaatctaaaagggtgtactagtcttataaatt

SEQ ID NO: 4989 - DNA, 308 bp, Lilium asiatic
gctctgggcatcggcgaggccggagaaaaccctagatccccgccattaataaagtccctcatcgccgagatcccgtgctgtttctctctcgatctctcctgatcttgcatcacaaagatcaatttgacatctgataccatgggcgcgtttgcatcgaggttgtggttcatgatgttcccggccaaggagtacaagatcgtcgtcgttggcctcgacaacgccggcaagacgactacgctctacaagctgcatcttggcgaggccgtcacgacgaatcctactgtcgggagcaacgtctaggaggtggt

SEQ ID NO: 4990 - DNA, 271 bp, Lilium asiatic
gcagtctcctgacattgcccagggtgtgcatggccacttcactaagcgcccggaggagattggtgctggtgaccagggacacatgtttggatacgccacagatgagaccccagagctcatgcctctgactcatgtcctcgcaaccaagctcggtgctcgcctaactgaggtacgcaagaacgggacctgcccttggctgaggcccgatggaaagacccaggtgacaattgagtatcaaaatgaccatggtgccagggtgccaattcgtgtt

SEQ ID NO: 4991 - DNA, 299 bp, Lilium asiatic
cagaaatgtggtgttagcatcccctatgctgtcagcccatccaccgattgctctaaggtgcgttgagccaatctgctacttttgctgcttaaaaatattgttcggaataatgcagactttgtttctgtacaaggtcgtaccagtgttcattgagggtgtgatgtcgttgctgtttttctatatttttatgttgctttttcagcccatattttactgctatgtaacattgtggtgtcgtaccattgcctatgaagtatgagttgctggttaccataagttaaagcactctttgtaatgca

SEQ ID NO: 4992 - DNA, 407 bp, Lilium asiatic
ctctgggtgttgacttgtcagtttatgggacatccaaagttgtaggaactcaagcacctgtccagttgggatcccttcgtgcagcggatggcaaagagtgaagttggtgaactctgttattccttgtcatcttattagtttgacgagggagaattatcggttgtgtagcctcaagtttagtatattggcttgctattgttgttaaaactatttatggcatttggttcttctcaaactttgccttatgttgggatatatattggtgtaggacacctgatcatttattttggctggaaatcttacctctctatgtttctgaccacaatttcatattgaattatttaatgttttctttcttaatgtactgaaatttaatgatttttttttttttattttatttatttaaa

SEQ ID NO: 4993 - DNA, 305 bp, Lilium asiatic
agagcgcaagcgccgtgcttctgccagtacaggagttaccctgctctgagtggttacataaactccccccggagcagggtggtggcatctacgtgcagggtacccatccccaactgctgatctatccatctaaatattgagtagtattggaggttttaagtatgtatgaaatcctggactggaggggatttgtattgttgtactaataagtaagtgatagggtatttcaggccctctagtgaatgaattttccttgttgggctgttttaatggctagcttggatcaataaagtattatacttact

SEQ ID NO: 4994 - DNA, 197 bp, Lilium asiatic
cacacgcgttcggcaacaccatcgacaacgttaataccaaaattcatgacaaggaagggatcctggcggaccagatgcgcctgatctttgccagcaagcagttcgaggtttgcccaaccctttctgattacaacatacacaaagagtcgacttttcatactgtgctgaggtttaggggagggatcatattatccctt

SEQ ID NO: 4995 - DNA, 330 bp, Lilium asiatic
gcaggagcgagagtttggctaaaaagcgatccaggctttctgctgccactaatccaactagtgctgcctaaatcatgattttatttagtaaaagagagctgcctctcttaatcttgatctcatatatgcttttgtgaaaatttgttgttgaagtcagcttttctatgtttttttgatctgtttttttttattttttctttgaatatttgactttgctatcttctttttaattatataaatttttttttgtttatttatctcatttttattatatatttattgtcgtgttttctttttatttgttctattgctttattttatttctttttt

SEQ ID NO: 4996 - DNA, 287 bp, Lilium asiatic
gttggacagcatggatcgcatgggtgggaggttcatggatcgcatggaccgtcggaggtggttctgagagtcttggtagctctaaatatcatctggcatggtttgaacgctctttgagctctatatttccttttgcatggtggatttaactttattttggtttttattttggttcagttgggtttttgcttgagttctgtttgaatttggatattctttgtttctggttcagtaacattcttaagaacttggtgtaattttatcgatatgcttgtggtggtcgaaaa

SEQ ID NO: 4997 - DNA, 379 bp, Lilium asiatic
tcgtggacgcgtgggggacgatctatggggtttgggttcgtaagctacgaaaaagaggggcatgccagtgccgctctgtctaacatggacggccagacattggacggccggaacattcgtgtgagtcttgccaacgagagacctgcaggtggtggctttcgcggtggctacagtggtggtggcggcggcggcggctatggtgggagatctggtggtggtggtggtgattatggtggtgacttctgagagactcgacggtggcagttggactgagggttctatattttagacttgataatgaaatttttagggtcgagtagtatctggtaggtggtattccttaatattgtttcttgacaattcagagttgtattgagct

SEQ ID NO: 4998 - DNA, 297 bp, Lilium asiatic
ccacgatgtggtaggccgacgagaaaatggtgcacatgccagcctaggacgaccatggcggcatgtactatgtatacacggccattaaggagacaatgatcctacaccggacagcgccggtcctcctcacagacatacgctacacattgactgcacatcaagcggtgcgtacacccgacaggaggccgtcctagcggcgaatgcacgcttggaaaggaccataggacaatggagaagcccgacgagataatgacgaagcgggtcgtgcaggaaccggacgccgaggacgtccacatg

SEQ ID NO: 4999 - DNA, 385 bp, Lilium asiatic
cgataatgcagatgaacgatatgtaacttttaaaaatgatgacgtaagacagcctaggggggatgatggatctaataaataatatgcgcctgacaacaacgcgaaacttgtaactcccgctactaataaatcagttggggatggcagaataggctaccaaactgtgactccataccctaaacaggctcgtacgaatgcttgcaaccatgataagtctaaacacgcaagcacctaagccaagcactccgaaatctggccgtactgggacctgcaaaacctgtactacgacattcaactcataaaatgctaggcacgctcattcataagctaagcatgaagccaaataatttgggacgaaaggatttattgtattttgactatagga

SEQ ID NO: 5000 - DNA, 318 bp, Lilium asiatic
gttatgacccaatatacccttgatgcacacgcgagctacgccttcaacagctattatcagaagaaggggagggtggttggcacgtgcgattttgagggtgctggtttcgtggtctccgaggctccggtggttggcaagtgcgtcctgtctacaactgggacatgaatggacagaagataacatggagagtagagatgaagaaaacatgggagcatggaatgaatgcgagtgctgcaactatccttgactttagtggggtcaacatgggagctttactttttttttggtggttgtggtcctgtggcctttattctgggg

SEQ ID NO: 5001 - DNA, 208 bp, Lilium asiatic
gtcaatctggcttttggtttatcttcctagcagggattttctttaagaatatctgttacttgtcagcctaatgctttagatcatcaaatgaattgctatttcttttaaaaaaaaaaaaaaaaaaaaaaaaaaaaaaaaaaaaaaaaaaaataaaaaatataaaaaataaaaaaattttttccctttacattaaaggggcctggctttt

SEQ ID NO: 5002 - DNA, 430 bp, Lilium asiatic
cggacgcgtgggggacgatctagggggtttgggttcgtaagctacgaagaagaggggcatgccagtgccgctctgtctaacatggacggccagacattggacggccggaacattcgtgtgagtcttgccaacgagagacctgcaggtggtggctttcgcggtggctacagtggtggtggcggcggcggcggctatggtgggagatctggtggtggtggtggtgattatggtggtgacttctgagagactcgacggtggcagttggactgagggttctatattaaaaactagataatgaaatttcaaggacgagtaggatttgggaagtgggattccctaataattgttcctgaaccaatcaaaagtggaattgagccttggggtgttgcattttgcgaccgggaatggcagaactatttgagcctggatg

SEQ ID NO: 5003 - DNA, 248 bp, Lilium asiatic
ctgacgcgtggtcggacgcgtgggcggagatcgagatcgtaagcgatgtcggcgacgcaagcgatgaagcggatcccgctgatcaaattccctcagaggcacctaaagccctcatgatccggatcgtctcccgcggctgccggtcagaagcttttctctcaatccgtccagccagaaaagagctcaacagctaccgagactcgaagctatagatacaggtcggatgttccttcaccaccattccatac

SEQ ID NO: 5004 - DNA, 386 bp, Lilium asiatic
ttccctcatttcaacccagagagagctgaagagatggaatctggaaagatagccaagggtgctgccggccgcatgggcggcgcaaggaagaagtccgtcccaagatccatcaaggctggactccagtttccggtaggtcgcattggccgctacctcaagaagggccgctatgcaaagcgtgtaggttctggagctcctgtctaccttgccgccgtgctcgagtacctagctgctgaggtgctggaactggctggcaatgctgcaaaggacaacaagaagtctcggaccatccctaggcacgtttggcttgctgtcaagaacaccaagaactggtcaaagcttgcttgcttgaattaacatcttccattggggggggaaccccaaca

SEQ ID NO: 5005 - DNA, 386 bp, Lilium asiatic
cgaagatgcgctcggccgacgggaagaagctggacatgctaccggaggacgacctcggggggatgccctacctcaaggcgaccatgaaagagacaatgagcctgcacccgtcgacgccactcctcctcacggactactccaccgtcgactcacagatcgacggttacttcgtacccgacgggacgcgcgtactcgtcagcgcctgagcgctcggaagggacccgacgacgtgggagaaaccggaggagttcatgccgcaaccggtcgtgcaggaaccgggcgccgtggacgtacacatgaagggctaggaccttaggatcatccccttcggatccggccggaggatctgccacgggatgaactgatggtatctgaccatggagatc

SEQ ID NO: 5006 - DNA, 226 bp, Lilium asiatic
cttttagggcattacaaagccaaaagaggtgaagaagttcaaaggggaagggatgccattgcacttgagctcaaagaaaggagatttgtatgttacttttgaagtctcattccctccatcactaacagaggatcagaagacaaagctcaagggagttcttgcttagggggctgcctttgctcttctgtgggctaaatttgcgcccttactgtagtttacacaattt

SEQ ID NO: 5007 - DNA, 421 bp, Lilium asiatic
gcactgtccgtacgcttctctctccctatctccatctgcaatcctcgcccgcccacgtgcggcagacatggcgtcgtcgggcaccggaaccggagccggacccggcggccgtgtggtggtcttcccgttcccgttccaaggccacttcaacccgatgatgcggctggaccgcgcgctgcacgcccgaggcctcacgattaccgtattccacagcggcgccctggacccggccgactaccgcgccgactaccgcttcgtgcccgtgaccgtggaggcagacccgaagctgctggcgtccgatgacatcgccgtcatcgtcaccacgctgaacgccagctgcgacgcccccttcacggcccgcctgtcggcgctgctggccgccgacgggagggacagcgtccggtgcgtcttcaccgacgtg

SEQ ID NO: 5008 - DNA, 234 bp, Lilium asiatic
gcgggactctcttagctttcttgtgtacttttcaacatatgtggatatcgacagcggagttggatgaatctggtccagccatcgtacacaggaagtgcttctaacgtgtttcttctggtcattggttttgtggtgtatttcgactatatactatggcgtcatgttatttagtatggtacttggcttgttgaggatattgcttgcgttgcaaacagcttttcgatggatatgtga

SEQ ID NO: 5009 - DNA, 288 bp, Lilium asiatic
  modified_base (138)..(138): a, c, g, t, unknown, or other
  modified_base (196)..(196): a, c, g, t, unknown, or other
  modified_base (247)..(247): a, c, g, t, unknown, or other
ccggggcgagcacgcggggggacggccagaagaacaaagcgaacgatcgcgagcaggcgacgacagaacgccacgagggggagacggaaactcaaaacacaggccgaccgaaaacaacgccgagaccgggaaaaccgnggccgaacccaacaaaaaggccgggaaaaacaggccgccagacgccagcgggcgaaanaaacaagaggggcggaacgaacgccccaacgaacaggggcgcaagcggaanggcaaacgaaacgcgcccagaaacggcgcaacaagcacggg

SEQ ID NO: 5010 - DNA, 394 bp, Lilium asiatic
cccacgcgtccgaaaagaaaagcagttgaccagacgagttctagagataataaaaagccaagacttttggttatcggacaagaatgtatcgaacctcttcaggctcttcgaaattctgggcatgaggtttgtgtgaacggagacaaaaggagggaggcacgtaagctggcagaaacctggaaaagaaagcaccgagaagggaaaaaagatgcgagagagcatcgtaggaaggagaaaaaaaaagccaaaaagggaaggaatttcccgccccagtttgtacctagtttcctgggcctacctaatgtaaaacaggattggctgcttggggtagaactaaaaaaaaccggtattcaaaatttggggttggatcctaagaccatttggttggatttcc

SEQ ID NO: 5011 - DNA, 175 bp, Lilium asiatic
  modified_base (11)..(11): a, c, g, t, unknown, or other
catcgtccggntcataaagtgaagacgctcttttcataggttgacctctttaattggcccttcctcctactgattgccttctaccactatttagcctttcatatgaatcaggccggtgcttaggcgcgctatgtgatcgaatcctggctcgtgacgactctgtattggccatgta

SEQ ID NO: 5012 - DNA, 426 bp, Lilium asiatic
gcggcactgtccgtacgcttatatctccgtatctccatctggaatcctcgcccgcccacgtgcggcagccatggcgtcgtcgcgcaccggaaccggagccggagccggcggccgcgtggtggtcttcccgttcccgttccaaggccacttcaacccggtgatgcggctggcccgcgcgctgcacgcccgaggcctcgcgattaccgtcttccacagcggcgccctggacccggccgactaccccgccgactaccgcttcatgcccgtgaccgtggaggcagacccgaaactgctggcgtacgaggacatcgacgccatcgtcaccacgctgaacgccagctgcgacgcccccttcaaggcccgcctctcggcgctgctggccgccgaggggagggacagcgtccggtgcgtcttcaccgacgtcag

SEQ ID NO: 5013 - DNA, 177 bp, Lilium asiatic
tgtctactgggcgaaggctgatgccggaggtcccaaacttccgttgcttcagatcgcacaggatcaccggctgcttgctgagcacatatgggaagaacccggccgtgcttttaaagacgccataccatctaaaccccagtgcttacaactcttaattgccactgtcaaatgccgcgt

SEQ ID NO: 5014 - DNA, 378 bp, Lilium asiatic
ctcctatggagctgaggtgaactacactgcggatctgatcaacgcgacgcacagaacgcgagagctagctatacggacgggacacaaccgcgcattcaaactgtcctgcgcaggcaccaagaggtggaacggccgcgcccgctctatgctggaggaggtgatcgcatccacaacctcacatacggtgtcgttcgatatgcctcggaaaggggctttaaaaacgtgaccggttaagttccgagcaccctgagtggccaccaagctgaccttgtacagcacgtactaccactccaagggcaccgatggatggtacgctaacatgtcccgtgctcaaccaaaccaaggacgtgacctgtcaaggccttcatggaatgcata

SEQ ID NO: 5015 - DNA, 289 bp, Lilium asiatic
cttctctgtagctgagctgcactacacttcggatctgatcacaggcccgaacagaacgcgagagctgggtatacgcacgggacacaaccgctcataaaaactgtcctgcggagccaccaagacgtggaacagccgcgaccgctctatgcttgaggaggtgatggcatccaaacccacacataagggtgcgttcgaatccctcgggaaaggggctttaaaaacttgaccggtcaagttcggacaacgccgaagggcctcccagctgacgttgtacagcacgcactaccac

SEQ ID NO: 5016 - DNA, 379 bp, Lilium asiatic
cttgtagttctctcaccttcgataacgatgtcttcttgctgtggtggaaagtgtggctgcgggtcttcctgcaagtgtggcagtggatgcaatggatgtggtatgtatcctgacttggctgatgggagcactgcctctaccactatgatcatggggtttgctcctgctaagggggagtttgaggggtttgagatgtatgctgagaatggtggctgtggctgcaagtgtggtgataactggcacttgaacccctgcaagtgtggcaagggagctcttcatgagaagaggatgtaaggtttgataccctttggttacctgtttctggtggagtgcctaataatggccattggttacaatattcaagccttttttgaccggg

SEQ ID NO: 5017 - DNA, 178 bp, Lilium asiatic
aaaaaaaaaaaaaaaaaaaaaaaaaaaaaaaataaaaaaaaataaggaagaacaataaaaaaggatcccagctatagtacgcgttcatacgacgtataaatgcttcttatggcgttccctcgggggctcttatttgccgtcctttcacaccggtgcatccgggttctcccttttttac

SEQ ID NO: 5018 - DNA, 239 bp, Lilium asiatic
gtgcgaaggctgaggccggtggtcttgaagctgctctgctccagatcgtacaggatcaccagcagcggtctgatcaaattcgagaagaagccgagaaagcaaagaaggatgccataagaactgcagtgcatgtttcagaacttttggttgacactgtcaatggtggggtcgaagaatctttcttaattgagaagtgtattgagcttgagattcgtgcattagttagtactattgtacga

SEQ ID NO: 5019 - DNA, 278 bp, Lilium asiatic
cctacgccctcgccgttatgaagcatcatgatccgatcggtgaggggctcgccatggatgcgaagctggatgcggcggtgccggactgcattgttcccggacaggttgccccggtgaagctgctcggattgaaggtatggcctatcaatgttaactttggttttgtggaacccgtgggccggcaactgcagtctatcggaaagttcatggattctgctgttagcctgatgaatgcatcatttcaagatcgctagaccggatggcaacattcagtttct

SEQ ID NO: 5020 - DNA, 82 bp, Lilium asiatic
cccacgcgtccgttgttttagtcgaaggaccccagagctaatgttgattgcctatatttatatggagaggtttttcagtatc

SEQ ID NO: 5021 - DNA, 181 bp, Lilium asiatic
ctcctctgtagctgaggtgcactacactgtagatctgatcacacggcgcgaacaaagcgcgagagcacgctatacggacgggaccaaaccgctcattaaaactgtcctgcggagccaccaacacccggaacaactgtgaccgctctatgctggaggaggtgtttgcatccaacccctcaca

SEQ ID NO: 5022 - DNA, 379 bp, Lilium asiatic
aaaagtctatgcaaaaagaaatcaaagaactaagcaaagagttctagttttagaatatgacaattcgtctcaaaccaaaaaggatagtgaagaacaataatttactactatttatgaacaaggagaacgttccgaattcatcataatcattacaaatatactataaatggaattatgatattatgtataagataaaatgagagtattcctttagacatattactctacttgattctagaggtggaggtaatttatataaaagaacatttattccctctaaataatttgaggaaataacctaattggattccaacgcctaatttaaaccacctttaaggttgaaattaaccttcaaagggaaaaggttggggtaaaaata

SEQ ID NO: 5023 - DNA, 299 bp, Lilium asiatic
ctcagctttcgagtatctagacggaatttttactgtgtgcgaattatagagaaggcacggttgaatgtgctgagctccacattctgactgtaagatgtcctactataggaggcttactgcgcgtaaacacgctcatgccttacctgctcccacattcaagagactgaccgaacttgacctgcgccatcttctccgatacgctgccgatagtgaccatatgctgcttgttcctaatgacgaaggaacgtatattgcttcccagcaagaacaaatggctctttttaaataagaatgactaa

SEQ ID NO: 5024 - DNA, 380 bp, Lilium asiatic
gcgctaagcttttgggtatccccatgaaacttttactggattcaaaatatgagaagagaacgggaaaattggtgttgaactaaaccacccaacttaaaaaaaagggggcccgctttatataactgaccttaaacacgcctgcgtccttgcgtgaaaacacatttttgagagtacccaaaattgacctgtggcctccgttcttttaaactggcgattgtgaaaacaccctagatactacaaaaaatgaactggggtaaattcttacccatttagaactgttggttatttataaagaggcccgactaaaatgggactatcaaatatatccacaggcttattaataaaggtcacccccctttaatccactaataacgcgcggt

SEQ ID NO: 5025 - DNA, 439 bp, Lilium asiatic
gaaccggcggggcgacccacgcgtgcgcaacctttgcaaccatgaagctgctcttagtctcggctctgctgctcgtactatcgaccctcaccgccgagggtgccgacgtttacgatgtctctggcaacatggtcaaacccggaactccctactacatcacatctgctatatggggtgctggtggtggcgggctcttccccctttttcgcccaagaatctgcactaaatgtcggttttgctgccccctaaatgtggctcaaaagtcgagcgaccttgacaaacgcctctcggtgtccatgtccccctccgactcgagcgaagaaatcagtcatctgcttaccgacctcaaaatcgagtgcacatatactccctccgatggtgggtacgccagtatggaagctcgacagctctgagcccaacggccaacgatatgtgacac

SEQ ID NO: 5026 - DNA, 337 bp, Lilium asiatic
gtgaatgtcaggttccaagctcgtctacccactccgtcacccataaataggatctagccggcaccggctcagacccatcacttcatttatttgtatgaaaccaccgatcttgtaaccggagatctgatggggaagtacgcggagcttctggacatgggtgtcaggatcgccgtccgcttccacacttcatttatttgtatgaaaccaccgatcttgtagccggagatctgatggaaaagtacccggagcttttggacatggttgtaaggtcggccgtcggtttcaactccaactgccccaaaattgccggattgtcctacaggccccattcaacggc

SEQ ID NO: 5027 - DNA, 235 bp, Lilium asiatic
  modified_base (60)..(60): a, c, g, t, unknown, or other
ggaagtcaggttccaagctcgctacctttcgcacccaaaaaggatctagccggcgccggncagacccacacttcatttattagtatgaaaccaccgactgaaccggagatcgaggggaagtacgcggagcttctggacatgggtgcaggaacgccgccgcttcacacttcttaatgtggtgaaaccaccatcctgaaccggagatctgatggagaagtacccggagctcctggac

SEQ ID NO: 5028 - DNA, 366 bp, Lilium asiatic
tccacgcgtccgccacgcgtccgcagagtttaggttttctcgcttgaactaagatgggtcgtggagttagcagtggaggagggcaaagctccctggactacctttttggtggtggagaggctcccacaaagcccgctgctaaccctccagctgctgacaatgctgggactgttgaaaagccctccggtgctccagctccacttgacaacggcaagcaggttcctgctggcatacaaggaaacactgcagggaacgcaaacaactacttaaaagctgttggccagaatactgccaccttcctaacggatcgtccttcaaccaaggttcttgctgaacctgtggttggtccctccctggcctaccttt

SEQ ID NO: 5029 - DNA, 240 bp, Lilium asiatic
ggctcacaccggggcatatacagctggcggtctagaatgatgaagctcttggccggttgctggtaggtgtcacgattgctcatggctgcgcatagccaaatatgcattactgtgttgctggacaagaagcaccatatcatgtactacaagctggacgaacagaataccacttctcaagacaagtaagttctgataggaatatggccctagactcatgacaagaattgtacttattcccat

SEQ ID NO: 5030 - DNA, 166 bp, Lilium asiatic
gtcagatctatagtatgatgagggaagcataggcgtactcaaagtgggcagctggaacggaactagggtttgataggatccgcgcggtggaaaaggagaggaccgcaaaaatctaactgggcgtgaacacgctgctgctttggttacatcgattgttaagagagtt

SEQ ID NO: 5031 - DNA, 162 bp, Lilium asiatic
cccacgcgtccgcccacgcgtccggaggagttcgattcgatctaggtggtgtctcctagttgacttgcgccaaggacgatccttagttcgtcttatatttacctttattttgtaagacttccactatgtaataaatactctgattattgtgacatttatctc

SEQ ID NO: 5032 - DNA, 202 bp, Lilium asiatic
gcggccactgatggatacaagctgacttactttctcaagggaaacgaacgcgttggtgtgacgtgagatcacagggatggtgaggctaacatggaagttcatggtggacaaacaaaagcaattggtgagaaaaataaggtgtgtagcaacgaaggcgctggctataaaccaggttggggtatcgaaactgcggaacgtcgca

SEQ ID NO: 5033 - DNA, 408 bp, Lilium asiatic
tcgcccactcgttcgaccaccaccaccaccgtcgtctcgattcgagcgatgtctggtcgaggcaagggagggaaggggctgggcaagggcggttccaagcgccaccgcaaggttctgctgtacatcatccagggcattaccaatcctgtattcctgcgtctcgcccgtcgtgcggcgtaagagaatatctgtctatctacaaagtaccgggttgctttatatttttgataacttatcttatttttattataatttattttttttttatttattttttttatttttttttttattttagtttatttttttttttattttattatttaattttattttattatttattattttttttgtttattttatattaattctttatttatttcttttttattatttctttttttt

SEQ ID NO: 5034 - DNA, 275 bp, Lilium asiatic
ctggtgccaaagaatcaagacggagtttactttcgaatataaataccttgaggatgaccttgtgtcagatttgcgtggagggtcataaagttagtagacaaatgattttggacttgctcttttgttttttttgtctttttagtccaaagggaatcgagtcattaatgaattagttgtaaatcttgcttcatgccagttcaaagttagcatagagaatattaatgaattagttgttattggatttttgacaattgcagctggagtaacttcctgtg

SEQ ID NO: 5035 - DNA, 335 bp, Lilium asiatic
gaggccgcgaaggaggctgttgtctaccactacacgcatgccgccagcgggttctctgccaagctgactccgaaacaggttgccgatctgtctgagaaaccagaggttcttcaggtgcaggccagcaaaacctatcagctgcatggacaaggagcgagtgttgggggcgtacgcccttccgtcctgtaagctttggaaagctgctcctgtgccatgaaaaccttgctcttaagtggtctgtctgtgcggtgaataaagggaattatgtattctactcatatgtactgttggcctggtactgtaatactatttaaaactggggtggaaggggtcct

SEQ ID NO: 5036 - DNA, 210 bp, Lilium asiatic
  modified_base (176)..(176): a, c, g, t, unknown, or other
cggacgcgtgggagacttacgaagggaaaattgtcggagtcatcttgtctaccagtgaacccaagagagactctgaagcaattttcgacgtcaagttttcaactcaatcctctcggaggctagtagaaggtccagctgaactggtgattctagagatcctattggtgaggcggagnctggcattgataacggctctcattcttcttatct

SEQ ID NO: 5037 - DNA, 288 bp, Lilium asiatic
gtcatgcgacggctatcctatgaccctttcctggctgtggaacacctttggtatggaaggccacttgcggaaggtggcggaacactccactcctttgtacctggagaaaaaaggcgcaggttctttgcacgtactagatgcacagcactgcaggaacttgacacgaaagccgttgacagcctgttacaaaaggattgaaaacatcgcctagccggaaacttagggtgcgttccggctggcctgtcacaggataactcaccgtctgcggtgatgtaatatgaaaacaca

SEQ ID NO: 5038 - DNA, 362 bp, Lilium asiatic
gttattcgagggccgcatcggccgctacctcaggaagggccgctatgctcagcgtgtcggatccggcgcccctgtctacctcgcctccgttcttgagtaccttgctgctgagcttctggagctggctggaaatgcggcgaaggataacaagaagaacaggatcataccgaggcatattcagctggcggtgaggaatgatgaggagcttggtcggttgctgcttggggtcaccattgctcacggtggtgtggtgccaaatatccattctgtgttgctgcccaagaagcaccaggacaagtctaagaagctggactaaaagaataccgctttttatgaattctagttctgatggactggactta

SEQ ID NO: 5039 - DNA, 240 bp, Lilium asiatic
gcgcccacccgtccgcggacgtgtggggttttagatggagtgccaccgctctagaagatacaacccctcgggcgcaaacaagaggcatgttacttcttgtatcgatggctccataaaatacaaatcattttgctcaacgtatatagaacgcacaagactgggacaacctcgtatttaccccgctgaagggccttttagcagatcttccttacgacaactggctcaataacaaaggggccc

SEQ ID NO: 5040 - DNA, 176 bp, Lilium asiatic
tcggacaagcagatctttcaaaacgtgcagctcagtgtcaattttcttgtttccttgctgaagaagaattggcaaaatgtgaggtgcctgtacctgaatagcaccatggggaagcctgtccgagtgttctaagcagagttcctttcttatagttctttgaagaggtttaagttgta

SEQ ID NO: 5041 - DNA, 294 bp, Lilium asiatic
cggacgcgtgggtgggatttgaacactacagaaaagattgaagctgctggtaaaaagaaggaagagggcaatgcattgttcaaattgggtaaatatgctcgggcctctaagagatacgaaaagggagttaaattcatagagtatgatacctccttcaatgaagaggagaagaagcaagctaaggtgctgaaggtctcgtgtaatctcaacaatgcagcgtgcaagctgaagttgaaggactacaaggaggcacagaagctttgcactaaagtgttggaaattgaaagcgggaat

SEQ ID NO: 5042 - DNA, 264 bp, Lilium asiatic
cccacgcgtccgcctgattcgtgcaaatcatgcgctgttttgcgtaaaaacagagattcggttgagggtttccatgtgtggacatctaaaatcatgctagtaaaatgttacttgtgtttcttcataagatctgcgaggtctggattttccatttgtggagttggtgataaactttggtcttaaatggtatcttcttatttggactgctattgtgctgttcaatatatagtcttctgtttctattggttcaaaaaaaaataaaaa

SEQ ID NO: 5043 - DNA, 246 bp, Lilium asiatic
cccacgcgtccgaaaaggctagctgagtcagacaaacttctgtatcatgccaaaaattagcctgcttggtgttacatttctgactgtcaatatcccataggtatgtcttcctgctaaacaggcgagtctcatttatcttacctgtgatccaacgagtgagttaataaatgtagttatactaggttactagcttgtaactttgtgtataaatttttatttatttatgaaattaatagttgcctctgt

SEQ ID NO: 5044 - DNA, 314 bp, Lilium asiatic
gtgaatttgatgccgagtggggaacgggttttcacatgtgtgatatcatttgctggaccgaggttggtgaaccaaagattcaaggaaaggtgcgaaaagctggggatcaaggtcttgcgagtggtgaacgtgcacgatggtgtgccgaatgttccaggccttgtcctcaatgagaaatttccagagtttatgaggaaggtgggagtggggctgccggagagctacactcatattggggaggagcttcttctcgataacacacattcgccttatctcaaggaaacctcggatgctgcttcattacataatttgga

SEQ ID NO: 5045 - DNA, 231 bp, Lilium asiatic
cggtgaccaagaagagatcgggagctcatcgcagccatggcgaaaaccgatccggactcatacatggcaaaagctgacaaattgacaaagctaagtttcactaggtggaatgctgattggaagactgctacggttttatatgaacaagctgctattggttacagaatgaggaaagatgatgagaaagccaaagaagcatttgagaaggcttcaaaaggacaagaaatgatt

SEQ ID NO: 5046 - DNA, 182 bp, Lilium asiatic
gaaaaacatgagcaacaatgttagggcgttaaaagatatggtagggccatcgacaagggcgaatctacgcgcagttttatggttcaccgggacaacatacacagcatcacgaaaccggacatccatactcttggctagccaggactcaatggagatgatgcctgccctcaatgataaggaga

SEQ ID NO: 5047 - DNA, 405 bp, Lilium asiatic
tcggcatttatggaggaccatcctggcggtgttgaggtcttgctagccgcaacaggtaaggatgcgacagacgatttcgaagacgtggggcatagcacatatgctagggagatgatggacaagtactacattggcgaggttgatgtgtcgagtgttcctacaaagcgtgcctacgttccaccccatcagacaccggacaatcctgataaaactttcgacttcgtgatcaagatactgcaatttgcagtgccgctgctgattttaggtttagcctttggcgggcgtttaaccttcggagcccggcagttcaccaaatctgagtatgcactatctggggcattctcaaaagctgttatgttatcgaatctatttggaacttttaaattcatgtttagacctaaaact

SEQ ID NO: 5048 - DNA, 350 bp, Lilium asiatic
gtcctttacttcaagaactaaagtctcattagcaacaatcgtttcatcgcttcgcatttagcgccaatgttatcgatcctttacttcaagaactgaggtctcattagcaacaatcgtttcattgcttcgcatttagcgccaatgttatcgatcctttacttcaagaactgaggtcttattagcaacaatcgtttcatcactttgcacttagcaccaatgttatcgatcctttacttcaagaactgaggtatcattagcaacaatcgtttcatcgcttcgcacttagcgccaatgttatcatcttatgagttagtagggcttcaaatctttatttgatggtatttttgtct

SEQ ID NO: 5049 - DNA, 452 bp, Lilium asiatic
cccacgcgtccggagaatgataaatatgggactcacggttcgatgaaaaaaaaaaaaaaaaaaaaaaaaaaaaaaaaaaaaaaaaaaaaaaaaaaaaaaaaaaaaaaaaaaaaaataaaatgaaaaaaaaaaaaaaataaaaaaataaaataaaatttactaataaaaaaatataaaaagggggggcccctttaaagtaccaaagtttatttcgcgtgtttgcaagtaaaaatttttttttttggtgccccaaatatttatttaatggccctttttttaaaacctttttcttggaaaaacccgggggttcccaaatttaattttttttaaaaaaattccctttttgccaggttgggttttttaaaaaaggccccccacatttctcctttcaaaaattttcccaccctttattgttatttgtgcccccccctttatggccatttaaacggggg

SEQ ID NO: 5050 - DNA, 274 bp, Lilium asiatic
aatgcatctggcattaggcgtgaattcattgagctaaggaaggactagatctagttttggagattagatgggtttggggcttccagctgttcactttctatgtttcatggttacaccagcctatagacaatttgattaaagttattcatatacttgtttaagactcatcaactcccgttgtggcttgaaatttatctgggattgctttatgtcagtgcttgatttaaacatatatgtcaggggttaatgtctaatttaaaataatggttggggt

SEQ ID NO: 5051 - DNA, 420 bp, Lilium asiatic
cccacgcgtccgggccgctatgcaaagcgtgtaggttccggagctcctgtctaccttgccgccgtgctcgagtaccttgctgctgaggtgctggagctggctggcaatgctgccaaggacaacaagaagtctcggatcatcccgaggcacgtctgccttgctgtcaggaacgaccaggagctgggcaagctgctcgctggagtcaccatctcccatggtggtgtgatacccaacatcaacccggtcctgctccccaagaagactcttctcaagggtgattctgctgcaaaaaaatctccaaggaaaaccccaaagtttccaaaaaaggctgccaaacccccaaaaaaggcgtggtaggataagtaggggggggaatcggtttcaccagaaaaatgaaatatttttctttaacgggccgtc

SEQ ID NO: 5052 - DNA, 262 bp, Lilium asiatic
cgtccggggacactttgggagtaactctaattacctaaaaaaatgaggggtatcactaaataacaatataaaatggtggaggtgggaagtcaaaatctactaatttttgtagatgtgcaaataacaagtcaacccattatttgcataaagtaacatgtgtcatgcatatctatagacgacacgactatatacttacatctatatctttggttgttacgtgctgcagatgcatacatggctactttcatgtcgggaacaatga

SEQ ID NO: 5053 - DNA, 378 bp, Lilium asiatic
gatcaatatgatcaaccatgtcagggcgcggcatggtagggtaggggctcgacatgggcggcgctaagcgccatcacatggtgcttcgggacaacatatacggcatcatcaaatcggccatcctccgcctggctctgcgcggtggaatgaagaggatcaatggtctaatttattatgagacccgaggcggtctgaacatcatcgtggagaactgcatctaccattctttaacctacactgatcactctcgccgtcagactgtgacggttaatgatgtggcgtatgctctcaagctccaggggcgcaccctctattgcattagggggcgatctatctctactatccaaggtcactgatactttcttgcgacatggtaat

SEQ ID NO: 5054 - DNA, 95 bp, Lilium asiatic
gcgctatcacttcgatacaagcatgctgatttttacactctacgcgagacaacatgtatggtggccactgggggggatttaatggcctttaattt

SEQ ID NO: 5055 - DNA, 182 bp, Lilium asiatic
ctccacgcgtccgcgcattaggccccggtacaggaaagaatataggggactaatgcagacgcggttattgaatgtgcatcgcatgtattattaccttactatccattgggtcctttaataactctaaggagagcaaatgatcgattctctatagatagtcatatccccaaaaggtctaatat

SEQ ID NO: 5056 - DNA, 202 bp, Lilium asiatic
cggacgcgtgggatcgggtcttgagtctgctggttttgattttgattgcatttgcactattttgtttaattagggatgtttcctatctttactcttattatgcggattctgttgattttagtatttagtgttctctgtgtttgttgttctgaacttgtttacagcaaatatttggcattttagtaatattgccattttctct

SEQ ID NO: 5057 - DNA, 265 bp, Lilium asiatic
actgtccaaggttggcattgtgaatgtaacatagattactgatgcaagcaatgatggaatgccccatgagctggagtcaactgatagctgcacccactattgccggctcatccagtaactttgttacatgcatcagagtcggagttattatagagccatatcaacagtcgttatcctccccacccttctataaagcacttcctctccatttcccctacattctagggtgtcacggtcggcgttgccagcccctttccttcgctat

SEQ ID NO: 5058 - DNA, 259 bp, Lilium asiatic
ggaagagtgtgtaaagaaactgccgtctggatatcggatgaatccgatacagtttgagaaggatgatgacacaaattaccacattgattttattgctggactcgctaatatgcgcgccagaaactacagcatcccggatgtagacaaactgaatgccaaattcatcgctgggcgaatcattcctgccattgccacctcaacagcgctggccacaggcctcgtgtgcctcgagctttacaaagttcttgctggtgggcac

SEQ ID NO: 5059 - DNA, 247 bp, Lilium asiatic
acgcgtccggttttctactagttgttctatcctcagactctgaatgctcggcataacggttcgattggggatgtggtaacaacaatcagattgggagacataagaaatcgaactattaaattgaagaacatttgccctacaagaacctcatgttgttctaaagaaaagagttcaagttagaagacaagtaagataaaatgtgtgaagcggatagacaaaactttacatggcaggcgagaacacaagt

SEQ ID NO: 5060 - DNA, 211 bp, Lilium asiatic
cggacgcgtgggccgtcgactacgtcgccttatccgacgactttaccctctaaggttagtcatgggctagcataacattgttcagccaatacggtcagttgaagaagcattggcggaactatgtgaagacatggtttaatcatcctgctcgcataactagtagacgtgttgctcgtcagaggaaagcagtggtgatcttcccacgccctac

SEQ ID NO: 5061 - DNA, 286 bp, Lilium asiatic
cttctctgccgttacccggagggatgacgggcatgttttgccggcgaacgggagtggcaactatggtgtctgcatctatcgggcgaaagggacggcgaaaagcggggatctggtgagagagatccgtgtggacgcgctcaatttcattacggatgctaagcacgccagcttactcgatatatcatgatggcttgacagagagtttgagggactgtcgaacatgtatgctgtaaatgacaaatcaattcgcgtaggcaatggaggtagcgtgaaattggctgctatg

SEQ ID NO: 5062 - DNA, 67 bp, Lilium asiatic
tcggggccggaatggcccttcgggttccttcgcctttcttctagaagtaaggattgtatacatttac

SEQ ID NO: 5063 - DNA, 434 bp, Lilium asiatic
gtggatctgagagctagggtttccaggaaatcaattggattgttcgatcgtcggcgatggggaagtcgtacccgacggtgagcgaggagtaccagaaggccgtcgagaaggcccggcgcaagctccgcggcttcatcgccgagaagaactgcgctcctctcatgctccgattggcgtggcactcggcggggacttgggatgcgaagtcgcagaccgggggtcccttcgggacgatgaggcacaagcaggagctggggcatggggcgaacaatgggcttgatattgccgtgaagctccttgagccaatcaaggagcagttccctgtgctctcgtatggtgatttctatcagctggctggagttgttgccgtggaagtgactggagggccggaagtgccgttccacccaggccgggaggacaagcctgaaccccca

SEQ ID NO: 5064 - DNA, 421 bp, Lilium asiatic
cctccccaccaccaccacctcctctcgctccggctccctcaccttcttcaagggggccaactcgagcccacgccggttggttgttcgggccgaggaggcggcagcggcagcggcgccggctgcaccggcagaggttaagacggtcaagcctccgccgattggcccaaagaggggcaccaaggtgaagattctgcggaaagaatcatattggttcaatgggattgggtccgtcgtggcagtggaccaggacccaaacactcgctacccagtggtggtccgattcagcaaggtgaactatgctaatgtctccaccaacaactacgctcttgatgaaatccaagaagtgaaatgaattctttctgtatgtgcctgagtgttgtagtgtaaggtcttggacatgtaaaatatctttatcgatatg

SEQ ID NO: 5065 - DNA, 410 bp, Lilium asiatic
ctccagccgaatccatcgtcaatggagagcgacggcaccgttggcaacggcgttaacaaggtggtgttcgccgccttcaagccttagctttttgtcccagcgctgaaggccgacgatgcggtgaagttctacaagggcgccttcggcgccgaggagctgaagcacgcctcactccccaagcggaaggccgatcaggagtttccgcttattctctgcgctgatctcaagatcggcgatgccttcttctccgcatgcaatgtggccgatgattccaccgagtctgtgaaggagggagctggaactgggagaaactgcaccgccgtcatcctcccccgagtaggtcatgaaccaacacggtggctcagtcctccgcaagaggaccatcctcaagagcgacactttcccggcta

SEQ ID NO: 5066 - DNA, 414 bp, Lilium asiatic
ggagcgtcccagcctgagagcaatggtgtttgtgaaagcccagaaggccagggcctatttcaagcgtttccaagtcaagttcaagagaaggagagagggaaagactgattatcgtgccaggatccggctcattaatcaggacaagaacaagtacaacacaccgaaatatcgttttgttgtcagatttaccaataaggatatcaccgcacaaatcatatccgcaagcattgctggtgatatggttcttgctgcagcttattctcatgaactccctcgctatggtcttgaaattggtctcaccaactatgctgcagcttattgtactggtcttctgttggctcgtcgtgtactcaaaacacttgaaatggacgaggactatgaaggcaatgttgaggcctctggagaagatttttc

SEQ ID NO: 5067 - DNA, 434 bp, Lilium asiatic
cggatctagcacgaactcgccggaatcatgccgaagcagatccgtgagatcaaggatttccttctcacagctcggaggaaagacgcccgctctataaagatcaagaggagcaaggatgtcgtcaagttcaaggtccggtgctccaggtacctctacacgctctgcgtgaatgatccggagaaggcggacaagttgaagcagtcacttccgccaggtttaagtgttcaggaggtttaaggtatcactctcagtctgcagtttgggggaagctggccctcatctcaacctaatcttagtagttcttagcactatgggaaccttttcttttcagcaatgaaccaagggaattatgtttccagatatttgattatatattcttgttttgggtggaaccttttcttattctactttttactggtgggtatttgtttatg

SEQ ID NO: 5068 - DNA, 429 bp, Lilium asiatic
gccaaattaggtggatttgacattcccgccgagagcaagattctagtcaacgcctggtggctggccaacaatccagaccagtgggtgcgaccagaggagttcaggccggagcggtttttggaagaggaggctaaggtggaggccaatggtaatgacttccgctacttgccattcggggtcgggcgaaggagttgccctggaattatactggcgctgccaattctcggaattacgatcgggaggttggtgcagaacttcgagctgctgccgccaccggggcaggagaagttagacacgactgagaaagggggtcagttcagtcttcatatactgaagcactccaccattgtggccaggcctagagtgttttgatgaggttggtatgtgttgttgattacatcttgttgtgtgttttctatattcgggtca

SEQ ID NO: 5069 - DNA, 181 bp, Lilium asiatic
caccagccgaaaccaacggcaacggagagcgacagcaccgacggcaacggcgaggacaaggggcgagacagccagccgacaagccagagcaccaagccccagcgccgaaggccgacgaggccgcgaagaacaacaagggcgccaacgagacccaggagcagaagcacgccaaacaccccaa

SEQ ID NO: 5070 - DNA, 123 bp, Lilium asiatic
gggattcttgcacacttcgctgaggtataggggtttaacaacatcaacgctctatcaaagggaggggagggtctcgtgaatggcggagctaaactacaaccttagttgctttttaacaacatt

SEQ ID NO: 5071 - DNA, 290 bp, Lilium asiatic
cggacgcgtgggcggattcagagaggatgcgtggggtcggcgggccacttctctgcatcggcgatctgctgagcgacgtcggcgacaacgacggccacaccggcgccggagattttatcagcggcgaggagagtcctcagccctcgtccacagcggcgatccctggtgatcgcctacgcccctcagacctcggtcagttattcgaggaaaagtataatatgttgatcgaatcattggctggaactgaccactcaaggacagggttaaacactcgagtaatgtgaagctct

SEQ ID NO: 5072 - DNA, 91 bp, Lilium asiatic
gtggatctgagagctagggtttccaggaaatcaattgcactgttcgatcgccggaaaaggggaaggcttaccctacataaatctaagattt

SEQ ID NO: 5073 - DNA, 345 bp, Lilium asiatic
gcctgatgaggcccgtctcctgaaggcatatggtgagcttcctgacaacgttcgtctcaacgagggtgtggttggggggatggatgatgatgatgatggcggggtcgatgattatatcgagtttgaggacgaggatatcgacaaaatctagatggattgcggtctgtgatctgtccctgcctcttttattatgatatatcaagtacttgtataacttatttttaattttatgtgagaccgttgtgtgttgcttgcttgttatggtggtatcgctgttgttactgtctttgtgaatcaaatcggctttgaataatgtttaattatcaagtaatttcttataagagt

SEQ ID NO: 5074 - DNA, 122 bp, Lilium asiatic
ggaagagcttgcctagaaaaaaaaaacatataatttttaaaaaaaacaacaaacaactaaattaagagaaaaaataaaaaaaaataatagcttacaaaaataacagtattattatatttaat

SEQ ID NO: 5075 - DNA, 425 bp, Lilium asiatic
cccacgcgtccgcagagggagaggggttgatcatcatgtcaggccgaggaaagggagggaaggggctcggcaagggcggtgcgaagcgacaccgcaaggtgctgcgggacaacatccagggcatcaccaagccggccatccgccgcctcgcccgccgcggcggcgtcaagcggatcagcggactgatctacgaggagacccgcggggtgctgaagatctttttggagaacgtcatccgtgacgccgtcacctacacggagcacgctcgccggaagacggtgacagccatggatgtggtctacgccctcaagcgccagggacgtactctctacggcttcggcggctagggttttgattgtaatttcgcgactaggctgtgcagcagcgactgaaatatgtgaaatgcctttcttatcttgactgtt

SEQ ID NO: 5076 - DNA, 348 bp, Lilium asiatic
gttcgtccacgcgtccggagagggagaggggttgatcatcatgtcaggccctggaaagggagggacggggcacagcaagggcggagcacaccgacaccgtaaggtgccgggggacaacatgcagggtatcaccgagagggccgtccgccgcctagcccgacgcggaagagtgaagcggatcaggagactgatctacgaagagaccctgggagcgctgaagatctttttggagaacgtcattcgtgacgcctgtacgtacacggatcacgctagtcagaagacggtgacagccatgggtgtggtctacgcacttaagcgctcagggacgtactctctacagcttctgcg

SEQ ID NO: 5077 - DNA, 390 bp, Lilium asiatic
aaagaaagcaaaaaacagtataaggagttaagggaagcaaaccgggagcagcgagaggaccgacctgcaacagctagaggaccgacccgcaaacactggagaaaccggagcatgcaactgagcctacaaacaatctgagactacacgggtggcacgagccatggcgtccaactggcccgaggagctctccctgtggccgcatctacctatgagagagaaatattccaaagggagaaacgacttaagacatggatcttgagcctaccccactatatatagcggcaagagcgggaaccaaagccgagcgggatactgaagagtcacgtcaaaaagcacgtacccaacaaggacctttgaggtaccgcaacaagccatctcgacaagatagac

SEQ ID NO: 5078 - DNA, 218 bp, Lilium asiatic
ggcgaactgaccaaagggatgcccgactcagcttttttcattctggaggattcatttgcccctggattccactactgcccatctgctgcattctgataatatcttacttgctggtaaatctcggtgttggtacatggttgagggtatctgtatggcttattatctaggtaatggcgtaattgttctattgacgaatgcttcatttcactcatctattt

SEQ ID NO: 5079 - DNA, 102 bp, Lilium asiatic
ctgacgcgtgggaaaaaaaaaaaataaaaattataaaaattaaaaaaaaaaaaaagggaaaaggggactttttattgaggtagctaacataaaaaaaacgaa

SEQ ID NO: 5080 - DNA, 123 bp, Lilium asiatic
ggggcgacccacgcgaccgaaaaaaaaaaaaaaagagaaaaaaaaaaaaaaaaaaagggcgaaaggaaaaaaagagggggaaggggacaagcgcgagaaagcgaggcgaaagcaaaacaaaag

SEQ ID NO: 5081 - DNA, 298 bp, Lilium asiatic
actctatggaggaagctggtggaaattgtccttttcatcttgaggaagcgcagtatcacacaataccaccccatccactgattctgctctcctcctttcattccagaaggacatcagtagggttcctctggagttaaaaatgtcatgtaatttatgtgtagcagtacccgccaagataatagtcgtttctttcacacagctgaaactttcgtatatgttggtagtggattggttctagtctcaccttctgagtgtatatctcgttatagtcctggaagtaaagttctcacacaagttt

SEQ ID NO: 5082 - DNA, 371 bp, Lilium asiatic
cccacgcgtccgctgcatcggagatgacagatctgatgaagatatgtttgaagtgattaacacggccgtttctggtccttcgctggcacctgcagccgaggtgttcgagtgcactgttgggcggaaacccagcaaggcaaagtattatctcgacgatacagcggacactgttagattgttgcagggtctagcttctgtctccgaacaagctcagatggatctcccctcaggctagcagtgttttcttctcgggctagcagtgttcttacttttgcatacatcacacaaggtgatttctgccaaattgttgtaacctgtctagcaaactgtaatttcagtttctcctcttttatgttatcttgtttgtttag

SEQ ID NO: 5083 - DNA, 195 bp, Lilium asiatic
cccacgcgtccgcggacgcgtgaaaaataaaaaataaaaaaaaaaaaaaaaaaaaaaaaaaaaaaaaaaaaaaaaaaaatataaaaataaaaaataaaataatttaaaaaaaggaattatttggttggttttttttttttgtttttttttttttttatatttttatgttagtgtgttttgtattttatttttatt

SEQ ID NO: 5084 - DNA, 400 bp, Lilium asiatic
ctgaaccatcgtcaacaatgccgtccctcaagtccttcaagatcaagcagaagctggccaagaaaatgaggcagaacaggccgatcccgcactggatccgcatgaggaccgacaacaccatcaggtacaacgccaagcgcaggcactggcgccgcaccaagctagggttctgaggggcgaagccgctaggatgcagtgctttcatctgtgctgctggagctagggttatgttatcattttcctatttactgtttttataagactgttgattggatactcttgttgagacctttcatttaggagttgtgtggtgtttgtggatcatttggatgattggggtttgatattatgttttgttacatgcttatgctctttcttaattgtagcagagattttggtt

SEQ ID NO: 5085 - DNA, 411 bp, Lilium asiatic
gagctagcaaggcgaagaagcctgatccgaggacaaagaagttggcaccgcggaagaagattcagcgcatgatgcagccaaagagcagacgggggtggttgaggccattcctgtcacaatggtgacgagcttcctccccaacggcatcaagagatttcctcagggggtttctgcaagaatgtcctggtgtttgatccgcccagggggtttgacaatgctggcccggtggtggcttccctcatggatttcgacggtgctggctaaggacaactcttccatcagagtagcaggtccaaattttcggagctgctcctggtgtccagattctgtgagattcatattatttgcacacaacattgctggcttcatgtcggcaagcatgccatgaagctcaataaaacacattgcaaa

SEQ ID NO: 5086 - DNA, 143 bp, Lilium asiatic
gctggaataagaagagattgggatgttctaaagattattgtctacggcggtttaattgaatcagggacaagcctttctattgtatcctctgcagctgggggcattgctttatcactaattattatagctttagcgtttgcaaa

SEQ ID NO: 5087 - DNA, 89 bp, Lilium asiatic
gatgatctgaggactcgggtggatagtttaccaattgtattgtgcgatcgctgactagggcaaagtcacatccttacagtgtagtgagg

SEQ ID NO: 5088 - DNA, 432 bp, Lilium asiatic
cggacgcgtgggaaactattgagtgattctatatccgggttaatttgatgacaacccgggaagatttctctcctaatatagatttgaatttttttggtttcggaagctattagtctctcttgtttagtctatttttatggacccgtcgagtactttaacctcctcattttgtttattttgatatttgttataaactttgtaaataggatcctgttactaggtccatgttgggaggtaaggaaagacctatcttggtgtgctaaaaaaaaatagatataattatagtttctatataatttgcctatttttctttactttaatattttttattaattattatataatatattatctttgtttttcaatattcttatattttttttttcctatgttttttttatttttttctttttgcctgctttttataatttt

SEQ ID NO: 5089 - DNA, 318 bp, Lilium asiatic
agggctaggaaggggaagccttccaaaaaagatgcagagggaaaccctaaaaggaacttgtccccggaagcgttggagaagaagcttgctcaggctgaaacaaagatagagaaaatggaaattgacaaaaagattaaagaggacttgaagactgttgcattgggtacattaaagataaactatctcgatcccagaattactcgagcatggtgcaagcggcatgaatttcctattgaaaagatgtctaacaagtttgtttttgggaaatttgcttggtcaatggatgatgatcctgattaaagaatctaattgaaagga

SEQ ID NO: 5090 - DNA, 393 bp, Lilium asiatic
cgaccgcctccctgtccagatggcagtccgaatcctttacttccagcagctccgcctgaagtccgacctttcaggcaactctggagacggttccttctcccaaaggatgatcagcagcagtgctccgagtgctgcagtatctccacgagacaactatgcttcactaagaagggagaatcgcgaactcaagctagagatatccagaatgcgggtgaggctcagcgagctcgagaaggagcaaacattcatgaagcaaggaatgcgagacaagtctgggagacatggaaaggcattttttgagtctctttccaaggggataggacggatagggatcttcggaccttcattagggaaacaccagaaaagtaccagaagggatcaaggatccgagag

SEQ ID NO: 5091 - DNA, 453 bp, Lilium asiatic
  modified_base (427)..(427): a, c, g, t, unknown, or other
gctctcgttgatcgcaccgctgccgccgctgccatcgccatggaagccctagttgcagaagcgacagccaacagcgatgaaaatgagtcactcgacgtcaaagcacaaaaggcactcgattgcccgtgtgtagccgagttgcgaaagggtccttgtggaactcagttttctgaggcatttgtctgttttatcaagagcaccagtgaagagaagggatcggattgcgtgaatccttttatagctttgcaaaactgcatcaaagcaaatcctgaggcattttcgaaggatgtcgtggatgaagaggaggatgaggaagtcgaagacataaaaatcatagcttcgtcttggtcgaaagaactcaagtcgaagatgtgggagagaaaggttctttatcattattgtgaaagataggatggattttgttgcnttactgattcttctcgaaatttgaga

SEQ ID NO: 5092 - DNA, 208 bp, Lilium asiatic
gctcacaattttacgaaccgatgactccgatttcattaacatatgaatccctaattgcataagcgacttatcatacagcgataaaaataatttatctatacatcaaaacgcgggcggccctctaatgggctccagtttctcatacccggaacatgtccttgttaaacttttttttgtgacgcatatttttattttatttcccgcactt

SEQ ID NO: 5093 - DNA, 336 bp, Lilium asiatic
tcgcttcccgatatgttgtgccaaggaggggtgtggtactcggttattgctggtggacctgaggtcgctgctaccgcaggacaaattggacgagctgttcagggcgtcgcttgggtcatttgtggagtcgagtggtggggtgtaccggttctgcccgttccctgactgtccgtccgtctaccgtgtcaccccgtcagaaatgttccctatggtgccgttcacgtgcggagcgtgcggggtggaaacctgcacaatgtgtcatcttgagtaccatgaggggatatcgtgcaagttgtacaatgatttcaaggaccacccaaacctttcgcttgagga

SEQ ID NO: 5094 - DNA, 391 bp, Lilium asiatic
gagctgaagagatggaatctggaaagatagccaagggtgctgccggccgcaaaggcggcgcaaggaagaagtcggtcccaagatcaatcaaggctggcctccagtttccggtaggccgcatcggccgctacctcaagaagggccgctatgcaaagcgtgtaggttccggagctcctgtctaccttgccgccgtgctcgagtaccttgctgctgaggtgctggagctggctggcaatgctgccaaggacaacaagaagtctcggatcatcccgaggcacgtctgccttgctgtcaggaacgaccaggagctgggcaagctgctcgctggagtgaccatctcccatggcggtgtcatccccaacattaacccggttcttcttcccaagaagac

SEQ ID NO: 5095 - DNA, 429 bp, Lilium asiatic
gcaaaaactgtgtttggcaatcaacctacaaaaccagagtacagagcagtgccatctgctgtattttcccagccaccaatcggacaagttggtctttccgaggagcaggccattgaagaacatggtgacattgatgtctacacggctaactttaggcctctgaaggcgactctatctggtctacctgatcgtgttttcatgaaaataatcgtcgatgcaaacacaaacaaagttgtgggggtgcacatgtgtggagatgattctcctgagattatacaggggattgctattgcggttaaagccggcttaacaaaggcggactttgattccacggtcggtatccaccctactgctgcggaggaatttgtgacgatgaggactcctacacggaaactccgtagggatccttcctcaagcgaggaaaagaca

SEQ ID NO: 5096 - DNA, 419 bp, Lilium asiatic
gtcgattgtcggcggtggggaccagccgctgtacatgttccccggcccgtaccccggtggtgcctactacgccgccttgcctaggatggtgccggcggagatgtatgcgatggggcctccggcgacggtggcgaagggggcgtacgcagagggggtggcgcgcagcggcgcgctgccggtgacggcgccggaggcgcaaggattcggcgtggcgtacgatagcgcgggtcgggcggtttactatacggggtcggtggtccccacgtatcagacgattgcgagcgtgggacccgtgaacccggtggtggaggccagcaaggtggcgaagccaccacaggtatcgtgattcgacgattagccttggtttagtctatatggtatgaatctatattttctttatttttttgggggtaatatgt

SEQ ID NO: 5097 - DNA, 175 bp, Lilium asiatic
  modified_base (113)..(113): a, c, g, t, unknown, or other
  modified_base (155)..(155): a, c, g, t, unknown, or other
gggacgacccacgcgaacaaacgaaagacgaccccgaggacaacaaaggcagggagaggcggacagaaacaggcagcacggggagggccacgacagcaccaacaacaccacgncggcagaccaggcggcaaccaggaaagaaccggaaagcgccnaccagaagcggaccgaacga

SEQ ID NO: 5098 - DNA, 295 bp, Lilium asiatic
gctgaaaggaggaaagaatgaccttctgttcatcagtaactcccaaagtatccaaaattctagcaacctgtcgtatccacctatgggcttccaaagggtcagggtctcccttgaatatcgggggatttaagcctttaaactccttaataagcttgggtcgagattcttgattttgccttgcagattgctcggcttgttgagaaatggcagcttgttgttggtgaaggatattagtcatattttggagtacggccagaagctgtccaaacgggtcctctacaattccactagtgga

SEQ ID NO: 5099 - DNA, 54 bp, Lilium asiatic
gtggaacagagagcgcgggtcggcaggatctcaattgtttagaccgaccgccat

SEQ ID NO: 5100 - DNA, 419 bp, Lilium asiatic
cccacgcgtccgagcttgaacagttgttcctgaaagatggtagaatagctttgccagattgggtgagtgacataactactatcttgtggtttcctgtccgcgctattgaggacaggctggcaagaggaacatctgcagtttatccccaaagtctgagtgttgtagatggaatgaggacagtggctttaaagcttgagtttggagctttccacaaccaaatatttgaaaggaccattgcagtgcatttcactgatcccttccgtgtcagtacacgtgttgccgacaaatgcaataatgggactctacttttgcaggtgataattcactcccaagtgaaggcttctgtaaaattacatgatgcatggttagatcttcaacctggctttgttcacattggaaaaagcgatgggagaccaaca

SEQ ID NO: 5101 - DNA, 223 bp, Lilium asiatic
cggacgcgtgggggatgatagaggcttacttatgagatctatagtttctatggagtctttttgtcaagtagtatggataagtttgcctttgtgatgttttagttggttaattaccttttagttgagtaaactgatgttatggcagctggtttagtttggtgtcatggttcggacctttgtttggaggtataaattcaggataatggtgtttgtttgattcata

SEQ ID NO: 5102 - DNA, 275 bp, Lilium asiatic
gcgtcctacgcgtccttcacagcctaaaccgattatgtttgcatttcgtctcatgccatatgtccagggtgaagcggaataattccctgagcaagatctagcatagctggcctatagagacccccagaatagaatactggctgtctacaatgagattgcatactgtgaataaatgcggctgatagacttgctgtgtacttattaaggctacacattgatatctaattacaacatttaaataggtatctttttgtcagttgtttgataatctttat

SEQ ID NO: 5103 - DNA, 382 bp, Lilium asiatic
gttcgccacgcgtccggccgagaactgtgttgatatcaactgggacaagggtgacatcttgttcatcaacaactaccattgccagcatgctcgccgcgctggcaagccgccaaggatggtgttggtttctgtggcgaattgaggtttgggcgtcgataccgttactttgagtcctttgtttggagcagtagtaaactttgtttggagcagtagtaaactttgtaagtgggtattctgcatgaatgatttgaataagctcagggtcttccgagcaacaatgatccagttgctgaagggactcctctggtctctattattaaagaatggcatgtgatatgttaaggatttttttttttctctcaatggaaatctctggtttttt

SEQ ID NO: 5104 - DNA, 163 bp, Lilium asiatic
cagtaaaaaagtatgtatgaccaaatgccttttttattataaatagacagcaaatggacaagggttggttattaagacataacatgctattcttttcacatttaaagggtcagatgtaagattttatgttactatcgtcctgatatacttatattttcttttg

SEQ ID NO: 5105 - DNA, 377 bp, Lilium asiatic
agaacaagctcgattacgtgcttgcactcaccgttgagaacttccttgagcgccgccttcagactcaggtgttcaaatcgggcatggcgaagtcgatacatcatgctcgtgttttgatccgtcagcgtcacatcagggttgggcgtcaggtggtgaacattccctcgttcatggtgagagttgattctgctaagcatattgattttgccctcaacagtccacttggaggaggtggccctggaagagtgaagcgaaggaaccttaagaaggctttcactaagaagggaactgatggtgatgaagaggaagaggattgagtgagttgcttgtgcttttgaccttagagattatttaaaactgtagctgtgctttaaatt

SEQ ID NO: 5106 - DNA, 141 bp, Lilium asiatic
  modified_base (119)..(119): a, c, g, t, unknown, or other
gggcgacccacgcgaccgcccacgcgggcggcagcagaggagcagcagcacccggacgcggccgacgcaggcgcgcgagcgccggaggcggaggcaaacggaaccaccagggaggggcngcgccagcaccaaccccaacac

SEQ ID NO: 5107 - DNA, 413 bp, Lilium asiatic
  modified_base (355)..(355): a, c, g, t, unknown, or other
tgttgacccaaagacaatcaccctaattgctagggagcttgcgatggctagccgtgttggtgtagaggtggctattgtttttggaggccggaatttcttttgtggtgacacctgggttgctgctacggacattgaccgagctgcagcacatcaaattggaatgatggcatcatcaatgaatgctttattgctccaggcctctttagagaagcttggtgttgaggcgcgtgtacaaactggattttcaatgcaagagattgcggaaccctacataagacgacgagccatccgtcatcttgaaaagggtagaattgtcatatttggcggaattggtgctggaacaggaaacaccctntttaccacagacacagcagctgctctaagggctttcgaaatccatgcagatgctgttc

SEQ ID NO: 5108 - DNA, 421 bp, Lilium asiatic
gtcatcgctggtccctcctcgcagccgctgctgcaatcatgggtatctcccgtgactccatgcacaagcgccgcgccaccggcggcaagaagaaggcatggcggaagaagcgaaagtacgagctcggacggcagccggcgaacacgaagctgtcgagcaacaagacggtgaggagggtccgtgtccgcggtggcaacgtcaagtggcgggcgctgcgtttggataccgggaatttctcgtgggggagcgaggctgtgacccgcaagacgcgtatccttgacgttgtgtacaatgcttcgaacaatgagcttgtgaggaccaagacgctggtgaagagcgccatcgtggaggttgatgctgctccattcaagcagtggtatttgcaacactatggcgttgaagttgggaggaagaaaaagtc

SEQ ID NO: 5109 - DNA, 277 bp, Lilium asiatic
  modified_base (198)..(198): a, c, g, t, unknown, or other
aggggccgcaggcggtagcctgtaccccaattggtgcaaattaatttgtcccccaatctatcctgatatctgccagcttaacgtcgcccagactagcagtgacctcgacgtcggtgtacccgtcatcttcactccggcgaacactgacgacaatgttgtccagtacttgaatgatgtaagcattaagttccatgcccncaccatctgtactctatcgacagtctggcggctggccaggccgacgacaatactgggaagcgctttgtgaccatcgggg

SEQ ID NO: 5110 - DNA, 423 bp, Lilium asiatic
gaagaacataagcgggttaaccgagtggtatggaaagaacaagaggctgagggagttggtgaatctagtcgtggtcgcaggcttcctggacccatcgaaatcgaaagacagagaagagacggacgagataaacaaaatgcactccttgataggtaagtaccagctcaagggtcagctgagatggatagcagcacaaagcaatcggtatcggaacagcgagctgtaccgctgcattgcagacaccaggggggctttcgtgcagcctgctttgtacgaagcatttgggcttacggtgatagaggcaatgaactgtggtctgcccacaattgtgacgaacaaaggaggacctgcggagattattgtcgatggagtttcttgcttccatatcgatcctttcaaaagagacgagtcttagtacaagat

SEQ ID NO: 5111 - DNA, 303 bp, Lilium asiatic
  modified_base (287)..(287): a, c, g, t, unknown, or other
cggacgcgtgggctgtcaccgccaggagaggaagccgtcaccaccaggagcagatgcagccgtcgctgaagatctgtggtgctgccagagttcagcggctctgctggagaataagggatgttgccgtcaccggtggccagccgcaactgttggtgctcttgccggcagccatcgccgacggccgtcgccggagatgaagaggtcatggtatacactctcaaagaccttggcagaggaggctgcttggaagttctccaaagagaacggcatcgatatggtgaccatanacccggcaatggtcat

SEQ ID NO: 5112 - DNA, 180 bp, Lilium asiatic
cccacgcgtccggccgacgtccccaaccccgacgccgacggcgatgccgacaccgtcctccacgatgaccgctccgtcacctacgaagagcttcgccagcgcctccaccgccgcatcgaggagctccgctccactcgcaacacccgccccgagcacaactacaaacccgtccaacgcgag

SEQ ID NO: 5113 - DNA, 429 bp, Lilium asiatic
cggacgcgtgggtctcaaaggaatcatatatccttcgatatccagtattcgtgacataacgaaggaggtggctgcagcagtagtgagagaagcagtgagagaggatatagcagagggttatcgtggcatggatactcgggagcttcagaagcttgatgaggaagaaacattagaatatgtgaagaacaacatgtggagtcctgtatatccgactttggtgtacaaagatgactgagagagctatagagggaagttgattcggtttggagtcaagatcacgaaaacattcaagtgtatttattaatatttattgtaccgtatataacagttggtgactttgaagcttcagtttcaaagacttacatattagccacctcttatggagtgcccttatcatatgatcggctagcacttaagctttgttgatgt

SEQ ID NO: 5114 - DNA, 374 bp, Lilium asiatic
ctcagttgaattgcgtgatcaacattcgtgtgtagaaaattcgatgagacataattgccccatctgttatgagtatcttttcgattctctgaaagacaccagtgtactgaaatgtgggcacacaatacataaggagtgtttccgggagatgttgaagcatgcccaaagatacacatgccccatatgctccaagtcggtaattgacatgtcaagaacctggcagagattagatgaggagatagaagcaactgctatgcctgaagaataccgctacaaggtttggatcctctgtaatgactgcaatgctacttttgaagccttcttccatgtaattgggcataagtgtggtcattgccgttcttacaacactcgga

SEQ ID NO: 5115 - DNA, 423 bp, Lilium asiatic
cgacttcagtgaagttagtaaagtggaaaagaaaggttcaccgtcattagctaaagtacatccatcagatgctagcaggggaggagaggtgaaatctaagattaccatggtcaagagggatgccaccaaaagaatacttatcagtaaagccccacctattcttactgtccatctgaagagatttggccaagatgctcgtggccgcgttagtaaattgaacggtcatgtcagcttccaagagatattcgatcttagaccatatttggatcccaggtgcgaggataaggagaagtgctggtatcggcttgtgggtgtggtggagcattcagggagcatgtcatcaggtcattatgtggcttatgtgagatcggataagagcaaaagtaaggttcaggaaagccctttgtgggtttatgtcagtga

SEQ ID NO: 5116 - DNA, 404 bp, Lilium asiatic
gtctgtggccactgctatcgagaagggctgttcccagactgaggttgagctggagatggagtctcagattgagtcaaagagctttgagatagctaggctatcggaccggctacaatattacgaagctgcaaatagagagatgtctcaaaggaaccaggaaaccgttgaaatggcacgacagcatcgattcaggcagaagaggagacataagtggttctgcgccactattggccttactattagtatcggagctgcagcccttgcatgggcttattttccttgctcagaaccgatatggtcgcatgaagtactgcaggcacaaccggcaatgagttcaagctgggatcaaataattttcaatttttacctagatagccagtgaatgcctgacctcaatacttttg

SEQ ID NO: 5117 - DNA, 314 bp, Lilium asiatic
cccacgcgtccggtttcagagtatcagcagtaccaggaggcgacggcggatgaggagttggattatgaggaggaagaagacggtcaggagatgtgagggttgcaggagctgcaacctccagttgctatttgtgtctgaatttgatctaggttttattaggggttgctaattagaattgttggtgcctggttggtgtctcattcttttagtaggttatttgggtgaaagaagtttgattaatatatgagtattttgccggtgtattttattttttcatattatataattattttttttttttttttttttttatt

SEQ ID NO: 5118 - DNA, 347 bp, Lilium asiatic
  modified_base (177)..(177): a, c, g, t, unknown, or other
gggacgcatagtaataaggttcagtcttgctttaacttgtggaagctctggatccagagctgtacgggatagtaagggtctggagctaaaattataaggttgagcataacctaaagaatggtagaggatcacacgttggttccgctctatttttcatatacatttagccttctgttnaagaaaacagacaacgcctagcttcattcttcttttaatactagatatttgtttttgcccccaacaaatgattcctttttattaaaatggtgggttgtatagagacacatttcctgtttataactatattttttgttgctgttacaaactttaaccttttaatacacatc

SEQ ID NO: 5119 - DNA, 432 bp, Lilium asiatic
cccacgcgtccgggggaagggagcaacaaagaaggagacaaagccagcgctgaagcccggggatgacagaggtgttgggaaacggaaggctgctgctaagccagttaagagtaaagtaaaaaagcctaagaaggaagaaaaggtgaaaaaggatcccaacaaaccaaaaaggcctgctagtgctttctttgttttccttgaggagttcaggaagacatacaagcaagaacatccaaatgtgaaagctgtctcagctgttggtaaagctggcggagaaaagtggaaatcgttgtccaaagctgagaaagctccatatgaagccaaggctgcaaaaaggaaggttgaatatgaaaagcaaatgtcagcttacaacaagaaacaggaaagcggggctgaggctgaggctgatgaggaagaggaagagggatctga

SEQ ID NO: 5120 - DNA, 422 bp, Lilium asiatic
caggtggccgcggcggcggcgcgtgattgacaagcaggcggtgtcggcggcggtggtgccgcgtgagtgattagatctgtgatgttgtatgtgatgttgcgtcaagattggaagtgatcgtcgttctccttcgagatttctctcaagatcatggagatgaatggaatctctgaagatctgtggagatttgcgttttctgtgtcatcggaacaatttatatgtcactatctcaagatctgtggcgaacagctgagattcgcgtttttctctctagatctttggctatctgaagtccaggagatttgtgctgtcactcgggatgctgagatttgtgcaatgttccgttgtcaaagtatatgtcagtttcaatatgctcttttgataggagcttgtgaatgttcgatccttgcatcagctggctt

SEQ ID NO: 5121 - DNA, 244 bp, Lilium asiatic
acgcatgtgggctcggcggcgtttctttattgttaagcaggcggtctcttcgggggtggttcgcgcgtgagtgattacatcggtgaccttatatttgatgttgcgtgcggattggaaatcatcgtggctcttcttaaacatttctctcaccatcatggagactattggaatatctccccatcttcagaaatttgtgttttctgtatgatcccaacaatttttcttttcctaatcttagatctgt

SEQ ID NO: 5122 - DNA, 278 bp, Lilium asiatic
acgcggattcagaaaaaattgcaggttccagacaaagacttctcgaagtggaaatgtgcatttgggtccctcaaccggcctgaggacattcaagattcagatgtaatatctagcctctttcagagaagagaagtttatggagcatgttagcagtacctagcggcgggacatgcttacactaccccaaagagagcgtatgccgcttatcataacccccacaccttttacaggccggtgagaatctgctactagtaaatagcctacgatgacaactttac

SEQ ID NO: 5123 - DNA, 422 bp, Lilium asiatic
gttcgacgaagaattggattactggttttactattgcttgtgtgggtagcctatcactcagtggatataatgcagaacttgcatggccttactatccatttctgatgactgcggctgggcaactatggtggcagattcagactgttgacttgtctaatcgtgcagattgcaataaaaagttcgtttcaaacaaatggtttggagctcttgtatttagtggcatcttatttggtcggcttgcatcatgataggtgaccttttttagctgatccaagactggaatggcatgcttggtgaggcgcggcaaaccatcatgtgcaaaaggtgtgggagttgctgtgaaaagctcaactgcgttacaccaggcagacgcgaatgggaaaaatgaatgattcatgcccccgctatgctgcagtcatgac

SEQ ID NO: 5124 - DNA, 364 bp, Lilium asiatic
acggccacgcgtccggtggaaagattataccgaggttgtatattggtcataccgaaggccacggatctatattcactgattatgtgttaactcatggttattaacacataagttggtcatggcatggcttgtagttcattatccgttatttacatcacaattatgaggaagtaattcaaatcccagctttctcatgataaccttacttagaatctacttctataaaccgaagcaagacttacgaaaccacatgtgttttcaatggcgccatctgtgggaggtcatccatggtctctcccctgattcagagtggaaacaaactctggattgtgagacttccatgtttaccttttaggaaacgaat

SEQ ID NO: 5125 - DNA, 287 bp, Lilium asiatic
gaagaatgatggattcaaatcctgaaagatgccaccattttcacaaatggttttgtcggtgaataaattgtatgtgggtcgactccaatcatggtctattgaaagacacctttaagctttccttgaaataacatctaaaagatctcgcacttgttatgctgtgtttaatgtaagagttggtctttgtacaacattcaacctgtttcaccattcctcgtaataaatataggttaaatcctttcttcttgttcgataacttcatcttattctttgcaatatattacatt

SEQ ID NO: 5126 - DNA, 94 bp, Lilium asiatic
gaaaaaaaaaaaaaaaaaaaaataaaaaaaaaaaaaaaaataaaaaaagaaaaaaaaaaaagggggacaaaagggaaaagggaaaacaaggaaa

SEQ ID NO: 5127 - DNA, 420 bp, Lilium asiatic
gaaaaatgaagtgttcttggatgtggatgaaagtgttaatattcttgtcaatagcaatgggcagattatccggtcagatgtggtgggggcgctgaaaatgagggcgtatttgagtggaatgcctgagtgtaagctcgggctaaatgatagggtgcttttggaggctcaaggccggtcaacgaaggggaaagcaatcgatctggatgatatcaagttccatcagtgtgtgcgtgtggctcgttttgagaatgacagaactatatccttcataccgccagatggtgcctttgatttgatgacttacagactcagtacccaggtaaaacctctaatctgggtggaagctcaagttgaaaagcactcaagaagtcgtatagagttcatggtgaaagcaaggagccagtttaaggaaagaagcac

SEQ ID NO: 5128 - DNA, 194 bp, Lilium asiatic
gccaagcgtacgagaacacgtgaaaattattttgaaagggccgaacactgtgttgatgcggccaaccatcgatcatgcactcaacatacttaaatacaatttccttcaacaaaagatcgattgctagaacaaaaatttgatcatgtacaaacctttatacatgatagacctaagagtcatacacacatgtaatg

SEQ ID NO: 5129 - DNA, 172 bp, Lilium asiatic
acgcgtcgggccaaacgaacggtcacgcgtatcgtggataaaagtgttaatattcttgtcaatagcattgggggtattatggggtcatatgtagtgtgggcgctaaaaattattgcttattttattggaatgcctgagtgtaagctcgggctaaatgatatggtgctttttg

SEQ ID NO: 5130 - DNA, 311 bp, Lilium asiatic
ccacgcgttcgcccacgcgttcgcggacgcttggtgaaattgtggatctataaaagatcgggaagatcatgcggtcacatgtgcgagatcacagggggttgtccccctgggagagttgaatatcaagattagagtttagattacggtgagattagagagatcttgtaataagtgtgagttgtgagagatttctgattcgagttctcatgggatgtaatcttcttttcattctctgtgagcattgtaaggttttctgaactcatcttgatgtaataactcttttatattggatgtaatgtgattcttttact

SEQ ID NO: 5131 - DNA, 212 bp, Lilium asiatic
cgcgtccgaagaatgctgcatatcacgcctggagcaaagcctcattattcttgcgaagagatttggggatcattagggaaagaagtacaaagttatcctaaaaactttatcattttttggtgatgcgcatggcacaagctgttttgttgccccatagaacctctatgtgaatctggatgaatccgagggaaagaggacaggcgtcttgatgc

SEQ ID NO: 5132 - DNA, 463 bp, Lilium asiatic
  modified_base (98)..(98): a, c, g, t, unknown, or other
cggacgcgtgggaaaaaaaaaaaaaaaaaaaataaaaaaaaaaaaaaaaaaaaaaaaaaaaaaaaaaaaaggagaataaaaaaaaacaaagattacantacacatgcatgcaacatacataacccttcaattgtgtttcctgtgttttttttactgtcccttttttttcatcccctggccttggatttcctttgcggtcctttaaataactcatttttttcccatcctcttttttttccctgtggttatttttaataaccctgcccttttccctccttttcccccttttccccttcctttcctttcaattggtactccctcctttagcgaattcttctccccctctctaaagttgtctctttcttctcctcagggcttaaattgttatatttcgccaacttctcttattcccccccctcccattccccttttcttttcctttccttttttttacccccttctc

SEQ ID NO: 5133 - DNA, 424 bp, Lilium asiatic
aagagatgctgcaatagcacgcctggagcaaagccgcatcattcttgcgatgagattggctgatcatcagggaaagaagtacaaagttatcgaagaggctttagcatttgttggtgatgcgcatggcacaggctgttttgttgccccagagaacctctatgtgaatctggatgatcgggagggaaagaggccgggcgtcttgatgcagatgttgatatcgagttttgaattagcgaaaacttctatcaaactggagagatttggtggcgtactaggaaatgctgcgctatttgctgtcagtatgctcgcattactgcagctgcagcaattaactttcaagtgtgataatacaaaagcgcaacagaagaagctttctctgcacgataattctaggagtattcggctaaagaattttgacgtattt

SEQ ID NO: 5134 - DNA, 430 bp, Lilium asiatic
gcgtacggtcttcatccccgccgctaccttcgccccgtcgccgcattctccgccatgagccgctccggccagcctccggatctgaagaagtacatggacaagaagcttcaaattaagctgaatgctaaccgggtggttgttggaacactacgtgggtttgatcagttcatgaaccttgtgatcgacaatacagtggaaatgaatggcaacgatcagaacgatattggaatggtggtcatcaggggaaatagtgttgtcatgattgaagccctcgagcctgttgctagaactcagtagtgttgtttctctcctttggttacttaatgcaagtagtaacaaacaagtttctgttacacttaaatgtctgttttccaaatacatacctatcgacgatagttgataagacgtattaaggtaaatgttatatttg

SEQ ID NO: 5135 - DNA, 254 bp, Lilium asiatic
cgggtcgagcacgcgttctggtagatgacgaggtttttgctcaatctttcatatcgagcagagcagggctctttggtagggagacgtgaaaagatacttttcaggcattggcgaatattggagtcattttatagttgttaaatacttgcggagattctaaatataatggttgggaagatgttttggaattaatcaaccatagtgtagacttaagtctttttaacttggaggatttgctatgacattcaatcgga

SEQ ID NO: 5136 - DNA, 330 bp, Lilium asiatic
ctcaaataataaaactataagtctaggataaaaatctttaggtatagcgatacacagttgatccgtttctaagagtatgagcatgaatatgtaaatttcttgagttatatcccttataaggatttctcccctcttgtttcatcatcctgagtaaaatttgcattctcaagttatatcccttaggatccttttaacattatatatatcattcaagaggtcttgtatattatggagtgattatacatataattttttgactattagctcaagattcttaataatattttaatcaatgggtctgaaaatataaatatgagttcctagattctc

SEQ ID NO: 5137 - DNA, 394 bp, Lilium asiatic
cccacgcgtccggggatttggttatatcggcaccatcattccgagtcagaagtgaaggagtctcatctccatcgtcttcaccgatttttccaattaatgtatcttctgtgcctttcaaattcaaccatattttttaagtatcccgcattataagatcaattttatgttggtagtgtcgctgaagaattagtgtatggtaatatgaactgtctttcggatggtacatatgattaggagaggaaacaaatttccagcagcttattaagaaaaaatcagatgatgtaagcagtagtgagattattattggtcgaattatgtaaatggagtagtgtcctattaagaaaattgtagatggtctaattgatgagaaattatcattgggtgaataatgtat

SEQ ID NO: 5138 - DNA, 371 bp, Lilium asiatic
cccacgcgttcgagaatccggagcttttgttgggggtcagctgctgccttagatcggaggtgatggcgggggagcagaagacgatctatcacttccatgaggtctcaaagcacaacgctactaaggattgctggctcatcatctccggcaaggtgtatgatgtcaccccatttatggaggaccatcctggtggtgatgaggtcttgctagccgcaacaggtaaggatgctacagacgatttctaagacgtggggcatagcacatctgctagggagatgatggacaagtactacattggcgaggttgatgtgtccagtgttcctacaaagcgtgcttacgttccaccccagcatgcaccgtacaattctgat

SEQ ID NO: 5139 - DNA, 269 bp, Lilium asiatic
gcggtatttttagtgaagattctgagttcttgtttattcaacctggaaaatcctagcaaatggggatttactgggtgggtctttcctacttgaaaacttcttacagagaaattttgttacatgtatcataggattcaactggatgtgtgcgcccaagaaagcttcctattttctcggtaatcagtttggttctcgtttgaactggggtactctcctaactatgttagagttttttttttgccaaatcatatgaaacacctgttatacct

SEQ ID NO: 5140 - DNA, 416 bp, Lilium asiatic
tcgatgatattacctacgctgatgtgaactactaactctttggtcgggatggcgcatttggagtttccccgggcaaccttcaaaattattaccatctctggtctaaggacatgaagtttagcaatactgtgaaggatgaagagggactatctagatttgccctgcctaacaaggttactggtcaagctatcaagcattccattggaaagagccatccagtgtgacttgtacgatacaattcagattatgttgattagtcaatcctgtgttcgtggagcaaggacacaggtgagggctctaggtgcatcacgatggcgaacaacatacgcttaggctttgatgcactgcatggagataatgaccatggaggggtgcaagatggaactactgccgaggtctggtattaccttaaaggc

SEQ ID NO: 5141 - DNA, 273 bp, Lilium asiatic
aaccaacctccttttttacttcccttacaatcctaagtatattcggcacactatgggcctcctagaccgacagtagatctaaccgtaactcctctactatatgagccacctcagtatgcaatgccaatctctgctagaacaaatcatgcatcctaccctgcataccatccatgacaactacatactacactttcttacgactaagctctttccgcacattctttagactaaccctcagaccattctgcaccttgaccactttattataccctc

SEQ ID NO: 5142 - DNA, 423 bp, Lilium asiatic
gcggaaaggtataattgttggaaatgatcaggatggggatgatacagtgctagttgcccatgtgccattgaaggacatgtttgggtactctacatcccttcgctcaatgacacagggaaaaggtgagtttaccatggaataccttgaacactccccggtttctcaggatgtacagacacaattaatgaacacttacaaggccagcaagggtacagctgattgatccattttccgcaagctgctcctagatgtactatttatttgctttatttatacacatcttgaaataagatgcaaattttccaaggtgaaaaatgtattggttgtcgagttgctgtaatttttggtccctgccccaatagtataaatatttattttttcaaatttcagcgatttatttaagattctaaaattttatttttg

SEQ ID NO: 5143 - DNA, 370 bp, Lilium asiatic
gtgacggcgagagagtgggaggagactgtgttcacggattttaacccattggttatattggtacatcatcggtatcggaggccaggtgaaaatgacagggtgagggttgaacttgagagggcagtgcagatgttctgggatgctgggctgccttcaccgaggtgtgtggcagtcgatgctgtcgacgaggatgacatagtatcagctctcagggtgtcgtctttcccggagatgctcttcaccaaagcggggaagatactccatcgcgacagagtgattaggggagcaaatgagtggtcgaagataatggcgttcttctactacaaagcggtgaggccatcatgtctggatgaaggtgcttgacataatg

SEQ ID NO: 5144 - DNA, 76 bp, Lilium asiatic
cgggcgacccacgcgtccgggacagcacagatgatagagctgtgttcatgattttaacccacgggtatattggaca

SEQ ID NO: 5145 - DNA, 334 bp, Lilium asiatic
gcggcatatttggaggcaaacggccgggttaatttatgggatcgggtctggcagctggctttgggatccgggggtagagtgtaacagtgcagattgtcactctatgggccgggttccgaggcccagcatgaacccatggcttgattgtctccaccgctacccggccccgctctgaagtgtaggctgagaaggaactacctgaacgagtattgataacggcgctccacagattattataaaatactatatgcattttgaaataactttgaggcgccctttgcaatacttatacatggttagaatctgccatgggaacttttccttgctcaatgct

SEQ ID NO: 5146 - DNA, 350 bp, Lilium asiatic
  modified_base (327)..(327): a, c, g, t, unknown, or other
cccacgcgtccggttttgagttcgccgccgctgccgctgccgcccgcaacgatggtggagaagggtagcaaggggaggaaggaggaggtggtcaccagggagtacaccgtaaacctccacaaacgcctccatggatgcaccttcaagaagatggctcctaaagctataaaagaactgaagaagttcgcacagaaggcaatggggactaatgatgtgaggattgatgtgaagctgaacaagcagatctggagcaggggaattcgaaatgtgccaaagcgcgtccgtgtgaggattgcccgcaagaggaatgaggaggaggatgctaangaaagagctctactctttggtga

SEQ ID NO: 5147 - DNA, 84 bp, Lilium asiatic
aaaaaaaaaaaaaaaaaaaaaaaaaaaaaaaaaaaaaaaaggcggggggaaaaggggggaaagaaaaaaagggagaaaacaaaa

SEQ ID NO: 5148 - DNA, 432 bp, Lilium asiatic
  modified_base (330)..(330): a, c, g, t, unknown, or other
  modified_base (393)..(393): a, c, g, t, unknown, or other
cccacgcgtccgcggacgcgtgggtcagaaaactgttgatggaccatccagcaaggactggaggggtggaagggctgcaagcttcaacattattccaagcagcactggtgcggctaaggctgttggcaaagttctccctgcattgaatggcaagctaactggaatggctttccgggttcccactgtcgatgtgtctgttgttgatctcactgttaggcttgagaaggctgctacttatgatcagatcaaggctgctattaaggaagagtcggagggaaaactgaaaggaattcttggttatgttgatgaggatttggtttccactgactntgtgggtgacagcaggtcaagcatttttgatgctaaggctgggattgctttgaatgataactntgtgaagctggtggcatggtatgacaatgaatggggcta

SEQ ID NO: 5149 - DNA, 399 bp, Lilium asiatic
gagaagggcatggatgggatggtgcagcttctggaggaggagtttaatcctgactcggtggtgttccctggttcgtcgtcgtcatcaccgtcaggatcttcttcctctgaagacgaggagtctgtggagcggaagcggaaatctaggcctaggaggcagaggtcagggagctactctgcaaggatggggcgacggtctgaggaggcaattgtgtgccatccggggagctcgctggtggcggtgatggtgcaagcgctggctcaccgggtgagctatgcttgggtcgtggaggagaactatgactttgtcggcattgtcgcgtttcaagatgtgttgaccctcttccgggagcacttataacaagaagcagcttgagcttgtatgttttcttgtagatct

SEQ ID NO: 5150 - DNA, 293 bp, Lilium asiatic
  modified_base (231)..(231): a, c, g, t, unknown, or other
  modified_base (240)..(240): a, c, g, t, unknown, or other
  modified_base (245)..(245): a, c, g, t, unknown, or other
  modified_base (275)..(275): a, c, g, t, unknown, or other
acgcattcagccatacctatacaattgaatcctaaatccccatattgctagtcaatgcagccgtcttaacaaggtgtttgaggatgcgcaattagataatttttttgtaagttatttccttgcccaatccgtagggatgcatgtcgataagttgtaatatatctcgatgaacttcaaaggtagagcactttcaagttctatccattaaaagaattgaggatttttcaaaanaaaaaactnaaaanaaaataactataccataaaaaaaaaaattntccatccttttgttttaa

SEQ ID NO: 5151 - DNA, 394 bp, Lilium asiatic
cggacgcgtgggcagaggttttaactagaaaggaatatgacggaaagattgcagatgtctggtcctgtggggtaacactatatgtaaggctagtcggagcttatccttttgaggacccggacgatccaagaaacttccggaagacaattgcgcggattcttagtgtccagtactccattccagactatgtacgggtatcagcagaatgcagacatcttttatccaggatctttgtagccaatcctgaacagaggataactataccagagataaaaactcacccatggtttctaaagaacctccccatcgaactcaccgatgagtaccataacagcttacaaaatgcagatgcaaatgcttcttctcagagcttggaagaaattatgttcttaat

SEQ ID NO: 5152 - DNA, 428 bp, Lilium asiatic
gtttcgggacctgcggagggcgatgcggagaaaggggcgactgaaatccgtcgaaaaggtctttgattgggttgtgatggcgtctaagcggattctgaaggagtttaaggatctgcagaaggatccaccaacatcttgcactgcatggcctgtggcggaggatatgtttcactggctagcaactatcatgggacctgctgacagtccctttgctggtggagtctttttggtcactattcacttcccgacagattacccgttcaagccgccgaaggttttctttcagaccaaggtttttcacccaaacattaacagcaatgggagcatttgccttgacatcctcaatgagcaatggagtgcagcactgaccatatctaaagtactgttgtcaatctggtcgctcctgactgatcctaatcctgatgacc

SEQ ID NO: 5153 - DNA, 304 bp, Lilium asiatic
caacctgtggatgggcatccatgtcggcaaggcccgcatgaagtataaagtgttctatgcgactctgggtgcagtcgaatctgagaacaaggatgccaaactctttaattgtgttcatagagggcaccagaactcactggagatgatgccagcattctttgtgatgctgctggtccggtggattttatcacccactgatcggggcagcacttggcctgttgtataccgtggcaatgttcttctacttcaccagatatgcttttggagtgccggaaaatctgctcaagaacggggggctgaattt

SEQ ID NO: 5154 - DNA, 425 bp, Lilium asiatic
acgaaggtagggtcttcctaacattaaggctttatgataattcttaagttgcactatattttgggccacaataatattcaacatgtagtgagtaagataaagatatgaaaattaaccgagaaatatgttacttatagaaattcatagttttatacatctaatacatgttaggaccacttatcgagacagatccaccctccaccacaaccccccccccacacacaaacaccataacccacatattagtattaaccatcaattttcatcaatattatgatcacctcgattttttttcttaaaatcccagaaaagtaaaaaaaatatattttgtatgtgataactcaagacataaatataattatctaccacataattgtagtaattcttaatcttagatatgtgatatcaaagcagtatacctatta

SEQ ID NO: 5155 - DNA, 267 bp, Lilium asiatic
cccacgcgtccgtggagcggctgctggaactgcagcggtcggagctgggcggtgctctgggggaggcggaggacggcggtgaggggatccccgtggggggagtgaggaaagaggagcggttgctggaattgaggccgcttgcgagtgctgtggcgaggtttgcgatacacatggaggtgggtgatgggctgcggcagcgggagaagcgggcggtgaaaattgaagtggttaggaaggtgagggaggccgttagctaccacgtggatg

SEQ ID NO: 5156 - DNA, 400 bp, Lilium asiatic
gcagtgggatgatgagctaattcatgaactccaagttttgaaaaacaatgatgcgcgagggttatgataacaaacaaaatggtgggcatgccgatcatgttgacatttctccgagtttgttgcacagcaacagcatcactggaaattctgacaaggagaaccagggatatgaatcaggatctgcttctggctgcaatgggcttctttgttggaatacccgcaaagcacacaaagaaaaggaaaccgtcgcaaagccgcgaaaaatcggccacctttccttgttcgggcatcgcagcaagccaaaggcacctggcagcagactgagcaaatgaccgggagaaatctagacatggaggctcatttgtgcattattcttataatttttactgtacattctcgc

SEQ ID NO: 5157 - DNA, 286 bp, Lilium asiatic
  modified_base (17)..(17): a, c, g, t, unknown, or other
gtctgggcgcggcaaangccgtattggtctcggcaagggcggcaccacgggcggccgctatattgcggaggaactctcccacctcacaatacggaagtggcgctcatcatcttttgcaacagggggaaactgtacgagtgcaacaacacttacattatgatgaggacacttgaaaggtaccaaaaatgcaattatggagctcctgagacaaatatagttttaagggagacttataatagttagcaggagtacttgaaacttaaatcaaaggtggaatcattacaac

SEQ ID NO: 5158 - DNA, 368 bp, Lilium asiatic
gttatgagctggttgaatggaatgtggagcctccaacaaggacttggtggcaacaacatgtactggctgtggtagttggtgtgggtgtttctgtggtagtggtgctaagtttttcggccctcctagtgtggactattcggaagcagaggctaagaggaccgggggtatacagaccagtgggtgcacatgttccagaacaagagcttcagcctatgtaaatactgcccgactctactaatatagtcatgatgtagaacttcatacaactctggtgaatccggtataaagatgcaatgctcttgtttcatgtaccaaagttaatatgagaagctgactttttgcaaggttgtctgtcaaagagcatacat

SEQ ID NO: 5159 - DNA, 410 bp, Lilium asiatic
  modified_base (10)..(10): a, c, g, t, unknown, or other
cccacgcgtncggaagcagtccgagatctcccctaaaaaggtgtcggagttccagatcatcgagatcgcggagaatatctgtaatacgaagaaggaggaggcggagtggatcttccagatcgatattgtcgagaagggagataagcttgagcttgttgaacaaggaactgaaggtcaatgcaactcagaatgcaagaccatagagcgggcttgccaagaggtcttgggatactcggatactgatgttgctgagtttttgttcaaaactaagccttcagcagataaattggcgaagttcctttgcaatgatctttcgaaagcatgctcttccaagccaccgccggttcctaagaccagaactcccggagaaccattttctccaaaaccaactaaagatgtcgaaatggaaa

SEQ ID NO: 5160 - DNA, 274 bp, Lilium asiatic
ccgattgtatatccctgagaccgcagattcggatcacacattacatcaattctgattggatctcactaagcaaaatacaatcaacccacctagattgaatcgacaaatcggacataatttctttctcacctttaccgatgcccagagagtctcactaccttccttctatttggttgaattgaaattgatctaaatttgattttattacagtgttcatcattgactggcgtaccgatccaattgagtattaaagacccagagactgaaggagggt

SEQ ID NO: 5161 - DNA, 393 bp, Lilium asiatic
  modified_base (312)..(312): a, c, g, t, unknown, or other
agcggatcgagaacaagatcaaccgccaggtcacgttcgctaagcggcggaacggactggtgaagaaggcgtatgagctctcggtgctgtgcgatgcggaggtggcgctcatcatcttctccaacagggggaaactgtacgagttcagcagcacttccagtatgatgaggacacttgagaggtaccaaaaatgcaattatggagctcctgagacaaatatagtttcaagggagactcagaatagtcagcaggagtacttgaaacttaaagcaaaggtggaagcattacaacgatctcaaaggaatctcctangcgaggatttacgtcccctcaacaccaaggagctcgagcaactggagcgccaactagacacgtctttgaagttaatccgat

SEQ ID NO: 5162 - DNA, 361 bp, Lilium asiatic
  modified_base (290)..(290): a, c, g, t, unknown, or other
caccgccaagatccttgccaaggtcatcgagtactgccgcaagcacgtcgagtccgccgccaagccctgcaccaccgatgacaaggcgatcgaggacgagctcaaggcctgggacgctgattttgtcaaggttgaccagccgacgctcttcgatctcatcctggcagcaaactatctcaacatcaaaggtttgctggacctgacctgtcagactgtggctgacatgatcaagggtaaaacttcagaggagatacggaagacgttcaacataaagaatgacttcactccanaggaaaaagaaaaagtgaagaaggaaaaccagtgggccttcgagtgaaaggccatatctttttaaggacat

SEQ ID NO: 5163 - DNA, 212 bp, Lilium asiatic
acgacgcccttacataacttatttcatcgtgtatcaactatccattgatgacagcgtgacgtgcttgaagagcatgcactagcactagtacgagctttcgtaaaaagtaaaccatacatgaatctgcaaactgttgacacacgtaatccttaagaacaaacgctaactatataaagggctgaaacatattttaataatagaggtatagacta

SEQ ID NO: 5164 - DNA, 405 bp, Lilium asiatic
aggcggatctggttaataaccttgggacgattgcgaggtcagggacgaaggagttcatggaggcgctcgcggcgggtgcggatgtgagcatgattgggcaatttggagtcgggttttactccgcgtaccttgcggcggagcgggtggtggtgacgaccaagcataatgatgatgagcagtatgtgtgggagtcgcaagctggcggttcgtttacggtgacgagggatgaggagggggagaggcttgggagggggactaacatcactctctttcttaaggaagatcagttggagtaccttgaggagcgccgcctgaaagatctcattaagaagcattctgaattcattagttacccaatctccctatgggttgagaagaccactgagaacgagatttctgatgatg

SEQ ID NO: 5165 - DNA, 340 bp, Lilium asiatic
  modified_base (133)..(133): a, c, g, t, unknown, or other
cctcccggccaggcggaaaaagggcgacgggaattcgtcgaaaaagtttttgattgggttgagatggcgtcgaaacggattctgaaagagttgaaagatctgcagaaagatccaccaacgtcttgcaatgcanggcctgtggcggaagatatgtttcactggcaagcaactatcatgggacctgctgacagtcccttcgctggtggagtctttttggtcactattcacttcccaccagattacccgttcaagccgccgaaggtttccttccggaccaaagttttccacccaaacatcaacagcaatgggagcatttgccttgacatactcaaggagcaat

SEQ ID NO: 5166 - DNA, 339 bp, Lilium asiatic
aaggatcctcgccgccgccctctcgctctttgaaacatggattctcagcctaagctggcacaagtcatcaaggtcattggtcgaactggttcgaggggtcaggtgactcaagtcagagtgaagttcctgggtgattcacatcgaatgatcatgaggaatgtgaaggggcctgttcgtgaaggtgacatcctcactttgcttgagtctgagcgtgatgccaagatgcttccctgattacatctttcaatgctcctgatgtttcaacttttaaatcttatgtacttctgattttgggatatgtttagtatgtgcgactgcctctttaggtttatggttttg

SEQ ID NO: 5167 - DNA, 410 bp, Lilium asiatic
acgctgctctctgctccctccttctctcacttcaccttttctccacctttctgtctgcctttctccccaacccccgaccatctccaccgtcgcgccagtggtccctcctcttggaccacccccagatgcggcagagaagatgcaagcgctcagcaccgtcgaacctgagatcaacgctcacgagctcctccttctctctctctatctcattgctttccttttggaaattaaatctcgagcttacatttgtctcccccctgcaggaattgcatgaaagacggtggagatttcacgcatgcgagcaaaagctatcaagcaaggaaggaaacgatcatgcacggagggccgagatctgaagaagatgctggatggctctgatgaggtgaaggtacgatgtgcagttctgatct

SEQ ID NO: 5168 - DNA, 276 bp, Lilium asiatic
gtccgcccacgcgtccggttgcagttgccctgcaattttttttttcttcctgtaactgttaatgagttctgctggctccaccaatgtgttgtatcagacgtgtgttttacttgtcttttgattctgcatctcaatttgtgtgttatgtatagtagctatgtgctcttttggttttctttaacttattcgaaccttgtggttaccctatttattttctttttctgtgacaccaactattttattatgtcaaatgcgaacatctggattttctatcaa

SEQ ID NO: 5169 - DNA, 376 bp, Lilium asiatic
ccgccggcaagaaggtcatcctcatctgtttccccggcgccttcacccccacctgcagcgcgaagcatgtgcctgggtttattgatcaggccttggctctgaaggccaagggtgtggatgagatcctggtgattagcgttaatgatgcatttgtgatgaatgcgtgggcgaagacctatcctgagaacaagcatgtcaagttcctagccgatggatctgggaagtacactaaggctcttggtctggagctcgatctctctgagaaagggctggggctgcgttcccgcacgtatgcaatccttgttgacgacctgaaagtgaacgtcgcaaacattgagcaggctgtggaattcactgtttccggtgcagacgacat

SEQ ID NO: 5170 - DNA, 279 bp, Lilium asiatic
  modified_base (20)..(20): a, c, g, t, unknown, or other
accgcatggaggggtagtcngatgtaaatttgttggtgtgtcctgcatgttggtgtcctttgtgtgcaacattttgttgacttctaagatcatgtcgaactgttggatggtatcgtaaatttaaagttttcaagagtcgggccctttcctggctcctttcgtaattataaatttatcgctctttttttaaatttattttctggctccaacgactcctcacctcgttgtaattttatctctctttctaattaatgcttctttgtgtttttttaatgttcc

SEQ ID NO: 5171 - DNA, 414 bp, Lilium asiatic
tggagtcaagataagatcaggccactatggaggcactacttccagaatacccaaggtcttatttttgttgtggacagcaatgacagggatcgggttgttgaggcaagggatgagcttcacagaatgctaaatgaggatgagttgcgagatgctgtcttacttgtgtttgcgaacaaacaagatctgcctaatgcaatgaatgctgctgaaattactgataagcttggtctgcattcattgcgtcaacgacactggtacatacagagcacatgtgctacgtccggtgagggactgtacgaagggttggactggctctccaacaacattgcgagcaaggcttgaaaattctgaaaggaagtgatatattgtataactatatacaatatggcgggtgtctgtttgtttgtagatcgg

SEQ ID NO: 5172 - DNA, 401 bp, Lilium asiatic
ctcgaagttgcaatgcagtattcgacaaccgatcatagcacatgtttgaattacgaagaagctggaacatcgtaacataataaatcttaaagaagtgtttgatgaccccgactcagaccatttttatatggttctagaataagtggatggcaaatggatttatgatgccttggcacgtgtgttggaatcgaggaaagtatttctaggagatactggaaggacataatttctggtctcatgtatctgcatgctcatgtaaagctataaatagaaaggagggggtagctcttattatcatccctcacaagctcaagctcttaaagtttcattccaagctaaggaagagagggggatcactctagcaagtatttcatcaagccacttcaagttagagggaaaga

SEQ ID NO: 5173 - DNA, 276 bp, Lilium asiatic
agaagaaggcttgtagctacacttattaggcgatatcaaagatgtatgtaaagttcaccatggcagcgatgggtgagtttttttttaaaacttattgaagctactgtaagtgtatgtattgttcatcggtgcagatttaatcatttcatattcatgtgcggtctcttgttttccttaaactgcatggtgtggtaatgtatctgaaattgatagctgtgatactcactgctattaactgcgaagtacatttgaaatctttaaaaagttatgactgct

SEQ ID NO: 5174 - DNA, 348 bp, Lilium asiatic
  modified_base (47)..(47): a, c, g, t, unknown, or other
  modified_base (287)..(287): a, c, g, t, unknown, or other
atggaagggacctgcgaagaagtgggaagaattgctcctcgatctangagtccatggcagcgaaccagggattgacggagaggaaatcgctcctatgtccaaggaaaatgtggcaactccgtgatcgcgatgtttgcgctaccctagcaccatgttatgttatgacattcttgagtgatcaaactctctgctgctttttacattatgttttcatgcttttatcaatgtgtgcgacaccttagcactatgttatgccatatccttgagtatttaacagagaggtctgnatatatctattatctgcttcctttttgatgatgtttcatgcatacagcataattttgggtg

SEQ ID NO: 5175 - DNA, 257 bp, Lilium asiatic
  modified_base (197)..(197): a, c, g, t, unknown, or other
  modified_base (230)..(230): a, c, g, t, unknown, or other
gtctgtgcaaggtcatcaaggaggtgcttggtgataaggttgagaaggttgtggtttctgaccgtgtggttgattctccttgctgtttggtcacgggtgagtatggatggacggccaacatggagaggattatgaaggcccaagcgctgagggactccagcatggctggttacatgtcaagcaagaagaccatgganatcaacccggagactccatcatggaagactgangaagcggctgatgctgacaagaacgac

SEQ ID NO: 5176 - DNA, 411 bp, Lilium asiatic
cccacgcgttccccacgcgtttttggacgcgtgggggttgttctcctcggatggcgtcagttctccccgaaccaggcagatgggcctatgaatccattgtattcttggccttcatcgtgctattatgcttcactagtgtgagtatatgtatgctggtctacttcccagtggctgactcattggtactgagagatgcgagccggatcgaactagagaggatgccttatgatgactactactcagaaggtgtttctcttgctgctaacccgagctatgatgttgggagaagctcggatgatgcctcgacaaagcctggatccatatctttccgaacgatgattagggatgacctcctggcttccgatggcctcgaggtaggcagcttctcgaggatgttgctgcccagagatg

SEQ ID NO: 5177 - DNA, 395 bp, Lilium asiatic
tggtgagaaaatggcaaagatgcagacgttcgatgatgaagcatataccttgtttgatgaacttttctcatatgcctgcccaaaattcatcactccatcggctccagatctgaaggagcctcttgcaaactacaaccaggatgcttataggctgcagttgaagctgttcctctatgaagttaagcagcagcagttgctctctggtgtacgtagttacttaaaactgtactctaccatctcaactgcaaagcttgcaacatatctggaagttgatgaacccacgttgaggacaatcttgatgacatacaagcacaaaatgcattcagttgatagtgatggaaagataatatccaacgctgatgtcgacttctacattacggaagacattgtacatg

SEQ ID NO: 5178 - DNA, 410 bp, Lilium asiatic
cggacgcgtggggtcgtactggctatcatgcacgagtggataaagcaggaaagggagcaggtcaagattcgaggcaagcgaactatagttgaagcagacaaaactggagacaaacatgagaaggaacctcaggaagcacgcaagaagacacagtggagagaacgctcggcaggttccaagaacgaatgacagggacgtccaaggttggagtggacgcccgtcaacacctcttacgccgagattttcagatacttgaaggctaagcatccagaataccgcaaaccaccggcgatgaccaggttccccggaagagctgttgacaatagtcgatactgcgaacaccatcaggattatgggcacactgttgagcagtgtcgtactctgaggaattgggtggagaagctgataaa

SEQ ID NO: 5179 - DNA, 312 bp, Lilium asiatic
  modified_base (120)..(120): a, c, g, t, unknown, or other
  modified_base (132)..(132): a, c, g, t, unknown, or other
  modified_base (283)..(283): a, c, g, t, unknown, or other
cccacccgtccggttaaggaaagggttaactggatttagtggccactctcccgggccgattttccggtgggattcacggtgggaaagtctgcttctccttcttccatataaataactcgntacgatgatcgntgccttggcttgttgttctcgtgatgctgctggagactcctgttccttctgctggattgaaagtatttgtagaatggatgtttagtttgtatttagtatcttttgtataattatcaggttgagatcttatatatttctgtgtatgttatcnggggatcccttttgtagtagttgttttat

SEQ ID NO: 5180 - DNA, 311 bp, Lilium asiatic
  modified_base (10)..(10): a, c, g, t, unknown, or other
cccacgcgtncggttcaggaaagggattactgatatagttgcagctctcccgtgacgtatatactgttggtatcacggttgtgaactctgctctccttcctccatatgaataacttcgctacgatgatcgttgccttggctgtatgttctcgtgatgctgctggagactcctgttccttctgctggattgaaagtatttgtagaatggatgtttactttgtatttaatatcttttgtataattatcacgttgacatcttatatatttctgtgtatgttatcggtggatcccttttgtagtagttgtattat

SEQ ID NO: 5181 - DNA, 166 bp, Lilium asiatic
caacatcttcttatcatctctgaagactgcaacactgctacctcctgcgatgaacactacttcttggactcatgctactcctgcaagaaagggctctgcaacaaagacgacatattcatgtacaaaagggacactgccttttgcgaggaagagtgccgacagaatc

SEQ ID NO: 5182 - DNA, 291 bp, Lilium asiatic
gaccggaacggaaggcccggcccaacccacccgtgcgaaaacttgataaatgaacagaggttttttgaggaatcaaaaaccaagaaacgcgatggcttgtgaattgccggcccgacattcaacactccaacggcttcagctctgcatgagccgcttgcagactacagccagtcagcctatctgctgcacacgaagcctgccctctatgaaagaaaacatcgacagtggctctcggattgcgtaactactcaaaactgtgctctaccatcttaactgcacgagcttgcatca

SEQ ID NO: 5183 - DNA, 240 bp, Lilium asiatic
gcatgattgggcaatttggagtcgtgttttactccgcgtacctcgctgcggggcgggtggtggtgactaccaagcataatgatgatgagcattatgtgtgggagtcacaggctggcctttcgtttaccgtgactagggatgatgaaggggataggcttggaaaggggactaagatcactctctttcttaaagaagatcagttgcaatacctttaagaacgccgtctgaacgatcttatta

SEQ ID NO: 5184 - DNA, 278 bp, Lilium asiatic
atgatgagtctggtcctgcgatcgtttaccggaaatgcttctgagtgcgctgttggaacaatcgacttgtggtttgaaactcctgtagtatgcgcctttggtaacctagagttgaagtcggagagtagagttgtttcttttgatgatcattgttgtttatttgctatgttggttatttggtgtagtaggcgatggagtctgttgcttgggttgtggatttttagtaaaaacagcttgagagtgaactgctatattgtttaatagatttggggtttagt

SEQ ID NO: 5185 - DNA, 323 bp, Lilium asiatic
gctatacatctcgaccttcctttctttttgacccaatcttacatacccgcgcgtgggtctttataactcatacatcatcaaaactaaatgcacttcactgtccctcaacatacaacttctctactttgataaccctggcgcaacccaactacatcgtctattaccacatgcaactatacaccactctcgtaatacacatgaggccctaaccgatcattacttccaacacttgaacaacctaacttattaatattacgcgcacttaattgccacattaaacgatcaaagtgttaagctttcactcatttatacctctttacttt

SEQ ID NO: 5186 - DNA, 402 bp, Lilium asiatic
ggcggacaacgcgtccgcggacgcgtgggcacaattcatgctccagcaaaaagtaccacaaccaccgcctttggcagaggcaaatggaagtgagacatctccctcacaccaccatattgccgatcaggagatgccttttgagaaaggtgaagatggtcctgtcccggttgtagaagacgaaaatacgatggaggaatgaataggtcatttctctgttgatacatgcttcttgtagactaccattgcctgaattcagcatcttgttcactggtgagggtggaaatgggaagttatgggagtccccacaagttctgcactcatcagacctacaggtgtatagagtttgaaataactaggttggaaagaggaaggtggtaaggatagtgttgatgctttatggat

SEQ ID NO: 5187 - DNA, 416 bp, Lilium asiatic
  modified_base (31)..(31): a, c, g, t, unknown, or other
tccgatctcatccttattctttgatcatgtnccggcccgcggcaaaggtgggaagggggcttcggcagggggcggcgccaagcgccaccgcaaggtgctgagggacaacatccagggcatcaccaagccggcgatcaggcggctggcacggcgtggcggcgtgaagaggatcagcggcctcatctatgaagagaccagaggagtgctgaagatatttttggagaatgtgatccgtgatgctgtcacctacaccgagcatgcacgccggaagacagtgacggcgatggatgttgtgtatgccctcaagcgccagggccggactctgtacggattcggaggttgatcttcttctctgctattctgggcttgagaggttttgattgctattagttatgattgctgtattctgctgtatg

SEQ ID NO: 5188 - DNA, 410 bp, Lilium asiatic
gtcttgctgtgtatatctttatgtgttgctgatttacatcagcttatagatattggtctgctgcttgcattttattgaggaggaagagatgaagcagtcggtagctacggtgcttctgagtgtgatcttctttgttgaagtaaccgccctgccgccggaggtcatggcgccggcgtatgttcaggaagcttgtgctgcggctggggcggtttatgaggcgtacagtgtgtgctgcgcttactaccaagctgcttctcgcttggatttcccgcctcttttagcggatgctgaggttggaaggttatgtattcagtgagatttttgatgttttaatggttagactgaaagcattgtagtagtgaaatagctgggagttgatcgatgtttggaggttcagccagttgatgtat

SEQ ID NO: 5189 - DNA, 341 bp, Lilium asiatic
gcgagagaatttgggaaggtcaaagagagatagttccaatatatgaagattgatgtggtgaatcaaactttagttgcagaagattaaactggtgttcatgatgttgaagaccttgcggaggctttttaggtaattttacaattccatgttgttgaatgggaagtgaatgaagattaaacaaattgtatgaatgttcggaggcgttctagaatatggatattaatggttgtgttcaacatcttgttcactggtgagggtggaaatgggaagttatgggagttcccacaagttctgcactcatcagacctacaagtgtataaagtttgaaataacttggttgg

SEQ ID NO: 5190 - DNA, 355 bp, Lilium asiatic
gcgcaagtctcgcgccacaagccgcagtaattccagctacaatcacctatttttgagggggcgcatgtaaaaagctcatctttctatcactgccttgtccgccctcacagacctcatatcatataccgaacatgcccttccttctgccggagatacactactatccttcactgaacgaatcggtccttcctctccggatccatgctgattgtagactactattagctggcttacgcttttcatacattagcatgggataacaatacaagatatgggacctattacaaggtctttactcatcagacctacaattatatagaacatgcaataactttcttattaaatagacagaggt

SEQ ID NO: 5191 - DNA, 416 bp, Lilium asiatic
  modified_base (347)..(347): a, c, g, t, unknown, or other
caactccatcactaatcaggctgacacgggtgatcttaatgcggcaaaagttgcagccatgaaagctgctgagttagtcaataggaaccttgtagggggtgcttacatgtccaccgaccagaagaaaaaactgttgtggggtaacaagaaaagcacaacagccgaggtgtcgcagcctacaaaccgctgggacctacaactttttgctgatcgtgagcgccaggagaaattcaacaaactcatgggtgtgaagggcgaccctgttccagagcagaaaatggacgacaaggatgcggagaagcagagggagatgctgaacatggacctggagaagcagtacactgcanggctgcggaggagagatggccgaactgtcggacttgggctgtaatggccgaactgtcggtcttagtatg

SEQ ID NO: 5192 - DNA, 411 bp, Lilium asiatic
ctcatgcaacaatgtggaatgccgaataaacctgtgacgagttttcctttcagacggttccggctttcaagggaaagagtttgccccctttcgacccgtccgtcggggcgtatcaacaggacggatacctcgccgatattcctgaatgcgagccattggtgaatccttgcaataatccagaagagaacatctgtaccagtgatatttattggccagattctttacgtccatttgagttcgagatgccatcgactcgttatcaggagagtgatattgtttttggagaaagcttaagtcttggtggattgaatcgtctgatcgccaacagcgtggatgcattccaaaactgttcgttctttggcatggataataaggagatatcgactggcgaagctcgcggagtgtcggttt

SEQ ID NO: 5193 - DNA, 392 bp, Lilium asiatic
aggttaggaaaacccgcggcgacccacgcgtccgctttttaaaggctaaccttgattaaatttctaaactgcatgatgatttgggggtccgttacatattcttaatgaacaatatactttacataggacaaaacgtaaaggacttctaacttaggagcttatttcgtcaccactgcatcctgcaacccctcggtaaattcctccaatactctacaagctaccttcatacttcgtgatctataatattcacatatcttaggtacaattgattgcaagataccatcgactctttatcaggagagtgatattgcttttggagaaagcttaagtcttgttggattgaatcgtctgatcgccaacagcttgtattcattccaaaactgttcgttctt

SEQ ID NO: 5194 - DNA, 370 bp, Lilium asiatic
gttacgtctttgagcctgttttttttacgaaatcaccatcaagggatcgggcgtgtggagccgattgatctgagttttgttaagtttcagtttttgctcggcagatcgttcaccaggtatgaatcataatcctttgattcatcgtcccaagttattcttgttcctggggcccacgttttggtgaatttctctcaaacttcctttctcctatgttctcttctcaatccaattcataatcatgaatgaatgatttgagtcttggttttctttttcatgttagtctgagccaaaaaggatgaaactgttgtgtcaattcggggtcttttagtgttaattgcgagaagttgattgaggtgcgctttcaaatatt

SEQ ID NO: 5195 - DNA, 93 bp, Lilium asiatic
accctagtctcgggctcaaatatggtctcgtcgccaccctccccaagaattgcggtgtcaacatcccctaccccatcagccccagcactgatt

SEQ ID NO: 5196 - DNA, 411 bp, Lilium asiatic
cagattcctaaggttttgtagcggcggggttgggggatctcaagtgctcgccaatggcttctaagcggatcctcaaggagctcaaggatctgcagagggatccgcccacgtcctgcagcgctggtcctgtggctgaagacatgtttcattggcaagcaactattatgggtccccctgatagcccttattccggaggagtgtttctggttaccatccacttccctccagactatcctttcaaaccacccaaggtggcattcaggacaaaggtcttccatccaaatattaacagcaacggaagcatttgccttgacatcttgaaagaacaatggagtcccgcattaaccatttccaaggtgttgctttccatctgttccctattgacggacccgaaccctgatgatccactag

SEQ ID NO: 5197 - DNA, 386 bp, Lilium asiatic
  modified_base (3)..(3): a, c, g, t, unknown, or other
acngattatcgaactaaaacattctatttctcattcctttactgcactgcacaaaatcctgcttggtcatcttattcctcatagataccaactcggaaattacactgcattcaccttatatcatacctctccccctccctcccctacattacaagtggtggattcattctcccgctatgctcctcccacgtcaatggccttgctagtccaactaggacaactaccgaccgccagactgcctgtacctgcctcaagtctctgaacaaccctattctccggctcaaatatgctatcatcgccaccctccccaagaattgctgtgtcaacatcccctaccccatcagccccaacactgattgcagcaaggtgaagtaaatccctgtatg

SEQ ID NO: 5198 - DNA, 281 bp, Lilium asiatic
  modified_base (272)..(272): a, c, g, t, unknown, or other
tcgtcgatctattcaatcccacatttttagaaaatgaagaatgcattatgtcattaaccgattctttgtccataatgcctcaaccatatgtaacacatgcacaccaagtggaatgcatctgatgcatattatcaattaccgtaaaactggagtctacattccttgtattatacatattgagtagacatgttctttactagtacagctacgacgactactgaccactagactgcctgaacatgcatcaactctctgaacaatcctaccattgngctcaaata

SEQ ID NO: 5199 - DNA, 395 bp, Lilium asiatic
cataacgaactgtgttcagccactctaaaactgtggttgtctgcggaaactgcagggtggggctgggccacccgactggtggcaaggcaggcttaccgagggatgctccttccggcggaaggcggattgagctcggttttggtctgttctcttagcactcactccccaatctttctgcggatgataaggatgatagaggcttacttatgagatctatagtttctatggagtctttttgtcaagtaggatggataagtttgcctttgtgatgttttagttggttaattaccttttagttgagtaaactgatgttatggcagctggtttagtttggtgtcatggttcggacctttgtttggaggtataaattcaagataatggtgtttgtttgattc

SEQ ID NO: 5200 - DNA, 414 bp, Lilium asiatic
ctcagcagcgagcgatcgaggtctgcagccatggctcctagggcttcatcggggggggagggaaaggccatcaagggatccagggcgtccgtgattcaagagggcatgagtatgcaaaccgtgagcgagtggaccacctgggcgatgaagaaggcgaaggtgatcacccactacggctttatccccctcgtcatcctcatcggtatgaattcggagcccaagcctcacatttctcagcttctcagccccgtctagggtttgatgatcttgatttgagatatttgttagggtttgtcgaacttgggttgacatctttgtttaaggtttgttgaactttgattgacatcttaaggtttgatgaacttggattgacatctttgctgtctgtggaagaaaatgtgttattttgattag

SEQ ID NO: 5201 - DNA, 412 bp, Lilium asiatic
  modified_base (88)..(88): a, c, g, t, unknown, or other
cgaatctctcatcaatcatgttaggccgcggcaagggagggaaggggctcggggtgggcggcgccaagcgccatcgcaaggtgctgcnggacaacatccagggcatcaccaagccggcaatccggcgcctggctcggcggggcggagtgaagaggatcagcggccttatctacgaggagacccgaggcgtgctgaagatatttctggagaacgtcatccgcgatgccgtcacctacactgagcacgcgcgccgcaagacggtgacggctatggatgtggtgtatgctctcaagcgccagggccgtaccctctatggctttgggggttgatctgtttctgtttatccgcatctctgtttgtttgttttggatggtaatttgggttgtggatcattgtatttcatgtatctcat

SEQ ID NO: 5202 - DNA, 396 bp, Lilium asiatic
cgatacctgagagaggttgcctccattatatggaagaggttgaaagctttttcctgggggcgacagccatctcttatcagctcaaactttcagatcaaggtccgatggctcgcgctctctgcaacgcctcattcactgccgctctctctaacggcatcgccgtgttcgccaacaggaggggctatgctgctgccgctgcagcgatgactgtggcgaggagcacggtggggcatatgcacgtgaagggtgctgttgtgggagcgatagatgcgactacatctttggtgccggatccgatcacggtgtactaccggccggcgaaccggtcggtcgagatcgatgctttggagcttctggagttgctcctgtcgcataaatcacgagattgagattgtg

SEQ ID NO: 5203 - DNA, 293 bp, Lilium asiatic
agctcgtggtgaggtgatcagcacaaagcgccagccacagggtccgaagccgggtttcatggtagagggggcgaccctggagactgtcactcccattccctatgatgtggtcaacgatctcaagggcggttactagatttatctatcttttgttctgggttttacttaactggcttgaatttaatcatttctaggctggaaccatggttttgttatctgtcttttgtgactttttcttatcttcgagacatcttaaagtcattgttgagtcttaaattgtgtcctcttttttc

SEQ ID NO: 5204 - DNA, 276 bp, Lilium asiatic
tatgtaatgctgggcattccgaacatgataatccccttaactccacaacgccctttctccctatggcttaagcctgtcccgaatggacctcactgccattcataaattttgctacagcacactcagaaacgagaaggaactaatgaattgtccttccaggaatggacacagcaaatgagggatatgctggacgcaaggaagcgcggggatgctgcttttcgcgaaaaagattttaagatggctattgataattattcacagttcctagatgtgggt

SEQ ID NO: 5205 - DNA, 156 bp, Lilium asiatic
ggaagacccggcgcaacccacgcgtacaaattaaaccgagttctatgctgctttaatatcctagccaacatatgtgctctgtaagatgtgagtataatctgcttctgcgcatttcatggtgtatggatgtgattataataagagatatagtgtggg

SEQ ID NO: 5206 - DNA, 392 bp, Lilium asiatic
cagcaaagctgcgtcatcagattcagattttaactaatgcaaacaggcacctagttggagaagctctgagttctctgactgtgaaggagctcaagcaattggaaaacagacttgaaagagggctcacaaggattagatcaaaaaagcatgagttgctgtttgcagaaattgagttcagtcagaaaagggaggtggagcttcaaagtgacaacatgtacctgagagctaagatagcggagaatgagcgaactcaagcagctatcgtgcaagcaagggctgagttcgatgcgcttccaacatttgattccagaaacttctaccaggtcaacaacatgctggaggctccaccccactatcatcatcaggatcagacagcccttcatcttggctac

SEQ ID NO: 5207 - DNA, 133 bp, Lilium asiatic
ggcggaaccgggacccacgcgtcgacatggccgccaccaatcgcctttgcgataggggtcatgtcgcctacggactgctctgccttgaccggaaggaaaacccagagggcttgaaaactgacgaagtgtggtt

SEQ ID NO: 5208 - DNA, 254 bp, Lilium asiatic
tatttatctgtaaggaatgctgctgatgttctgcgatagctatattgatgcaggcgcgtatatgctatgaagtgtttaccaaaaagaaaaaaaaaaaatgctacgaagtaaaaatctgaaacaatgttaattagcattgtatttatataattatgggggttctttttaattatatatattagagtgatatcacctaatgtagagagccgttgataaacttagatatttggtcctcttatttaactgatttctgt

SEQ ID NO: 5209 - DNA, 403 bp, Lilium asiatic
cccacgcgtccgcggacgcgtgggcggacgcgtgggcgccgccggagactacagcggggtgcgagatgccggccggtcatgggcagcgctcgcgcacgcgcgacctcttcgcccgtcccttcaggaagaaggggtacatcccgttgacgacgtacctccgcacctaccacatcggtgagtatgtggatgtgaaggccaacggcgccatccacaaggggatgcctcacaagttctaccacggccgtaccggtcgcgtctggaacgtcaccaaacgcgccatcggcgtggagatcaataagcaggtggggaacaggattatcaagaagaggatccatgtgcgtgtggagcatgtgatgccctcgaggtgcactgaggagttcatgctgaagaagataaagaacga

SEQ ID NO: 5210 - DNA, 410 bp, Lilium asiatic
  modified_base (391)..(391): a, c, g, t, unknown, or other
gataaatcatgatggcgaggttaaccgacctcgctttatgcctaaaaacccatttataagagcgacgaagacagtcagcgcagaggtgtatgttttcgattatagcaagcatccatccaagccacctcaagacggggcatgcaatcctgatttgaggctgaagggccacaatactgagggatatggtttatcttggagtgttttcaaacagggtcacctgttaagtggttcggatgactctcaaatatgcttgtgggatatcgaagcaactcctaaaaacaagtctcttgatgctcttcagatttttaaggttcatgatggagtagttgaagatgttgcttggcatttgagacatgaatacctatttggttcagttggggatgatcatcanatgctcatatgggatctac

SEQ ID NO: 5211 - DNA, 447 bp, Lilium asiatic
  modified_base (76)..(76): a, c, g, t, unknown, or other
ccggtacggacatgcccggctccgacgccacgcggtgacgccgaggggccgacctctttttttacttcttattganacaagaaaatgactacaatactagagtggggtgacgagtttgccaaactatcgtcgggctctttaacgaaggcaatacccagctccagaccaagttcagccaggagcctgagcccattgactgggagtattataggaagggaattggtcctaaactggtggacatgtacaaagaggcctttgagagcatagagatccccaagtatgttgacactgtgactcctgaatacaagcccaacttcgatgctctgttggttgagctgaaagaggcagaagagaagtctttgaaggagtcagagaggctggagaaggaaatagccgaagttcaagagatgaagaaaaaaatcagcacaatgacagctgatgagtact

SEQ ID NO: 5212 - DNA, 403 bp, Lilium asiatic
gagataatgagcaacggacaatatagaagcctcaagcatagggtaatgatgaacgccgagagagagcgtctctctatcgctacatttcatggaccagatggaggatgtatgcttggtcctcttccagaacttgtgagaggaggcaaagagaattacaagactatgcgccatgcggagtacttgaagaaatccatatctgaaaagcaggaagggaggagcttcttagacaaaatgaggctggaatgaagaaaccatgtcaatcctttatggaattaattccgaggattaatttcatgaacttcgaatcctattttaagtacaaataaagaggcttttttgtactatagtgttgaagtggtcttcatgtttccattggaataagtccaacgttgttcatgttttt

SEQ ID NO: 5213 - DNA, 266 bp, Lilium asiatic
aaaagaatgattaccttaaaaaagctacttattactcttcaatgctagaggtgactgcgctcgatagcgaatcaatatatatgcttttgatatacttaagggagcaaatcactctggtcatgttaacaaacttgatcgagtcttaacactgtactacacgacgatgctacatggggctaacttacagcgttgactgtttggacaccaggatgcctggactatcttttacgtgactgggctatattcacgaatccatgacaatcctc

SEQ ID NO: 5214 - DNA, 228 bp, Lilium asiatic
cggagccgggattagggctgggatcggtgaggaggcgaaaccgccgactgatgggggctgtttgctatgcgtcgccgctcatccctcaaactgagcatagcatttatgctgtctatgcaccgatactgatgttaggcaaaggcactgctatgcaaaaatcccatatgactcccctagatgctctataagcccctgcaagtgtaatatcatgcatcaagggcgagtatg

SEQ ID NO: 5215 - DNA, 185 bp, Lilium asiatic
ttttagataaaactcttctttaatatcttatagaatatttgaaaattttattgttgggtataaattattgatttaattatcttaggggaaaatttatttcaaatatggaataaattcctaattcaataataataatgaatgaatgaataaatggattaataaaaaaaatattcccttttgaatat

SEQ ID NO: 5216 - DNA, 320 bp, Lilium asiatic
ttgaaatagtttaaaatgttgcttgttgagtgttaatgtaagtagcaaaataggagaaacctatgtagtataggtagaaattggaggtgtctaaagtgtttgtaacccaataaatacccccctaagagggcaatataatgtaaccttcattctccactttacatggtatcagagcagggacatgtctagggttagggctcaagtttctccgaatttccttccctcactctagacctctgatccttcctcttgaactagaaagagaagaggaaaaatagagagggagagagaacaaaaaaaatatactatatacctcatca

SEQ ID NO: 5217 - DNA, 304 bp, Lilium asiatic
atcgccggcttctccacccaccttatgcgccggatccagcgcggcccagtccgtggcatcgcgctcaagctccaggaggaggagcgcgagcgccgcatggacttcgtccccgacgagtccgccatcaaggttgacgagattattgtggacaaggagactctggagatgctcgagtcgctggggatgtctgatctgcctggcgtgcacaggcaggttgaagcgccagcgcagcctgcatatgctggacgcggtggcggtgggtttggtggaagtggctttggcgggtcgcggtggctgaacccag

SEQ ID NO: 5218 - DNA, 242 bp, Lilium asiatic
  modified_base (108)..(108): a, c, g, t, unknown, or other
cacgcccacgcgtccggttgtcatagccctatccttacactatgctatctggcacactcttgctcaaaagctataggttttttttggagcggtacaaccgaatatacngtacctgtctttcatacatctacaaagcctgggaaagcccttaaagatcatagttaaagtctcacacttaacacattattacaaactggtggcgaaagacctatcaagccgcgtcaaatcgtcatatataacac

SEQ ID NO: 5219 - DNA, 332 bp, Lilium asiatic
cgggaattatgcaactgcactcttcaatgcggcatccaaagctaataagctagaaaaggttgaatctgagattcttgatattgttgaggcttcaaagaagagtccaaaattttcaaacttcataaaggatttgtcagtgcctagagagacaagagtgaaggctatacaggagatatttgccgaagctggttttacagaagtcactaagaatttcttggctgtactggctgataacggaaggcttaaatatcttgaacggatctcaaagagatttgtggaactgacaatggcacataagggggaagataaaagttcttgtgaccactgttatt

SEQ ID NO: 5220 - DNA, 351 bp, Lilium asiatic
cccacgcgtccgtggacgcgtggcatcccttcgccctcaaagccctcccggctgcctcggcggctgcggcggcccgcctacagctcctgcccatctcctcctcaatcggcgtgccactccctccacggaaagccccgatcctcagcatcacggggcggcgggcgctggaatcgccatccctccgcctactagccgccgaggacgacgagtggggctcagaacccggagattacagcggattggcagcggaggaggtgcctgacgtgccggaaccgggctcgatcgcggatctgaagcagaagctgaacgatctcctgtacggtacggatcggtgcctgaacgcgtttagcg

SEQ ID NO: 5221 - DNA, 280 bp, Lilium asiatic
tctcccactcgttcgcggacgcgtgggaaaaaaaaaaaaaaaaaaaaaaaaaaaaaaagggaaaaaaaaaaaaaaaaaaaaaaaaaaaaaaaaaaaaaagaaaaaaaatataaaaaataaaaaaattattaaaaaaaaaataaaaaaaaataaatattttttaataggggcctaaatttatttaattgaccgtttttttacaccgtcttgactggtataactctttttttttccaacttattttctttttattgcatcccctttttaaaaattttttttt

SEQ ID NO: 5222 - DNA, 402 bp, Lilium asiatic
gtttgttgttatgtttatttttgtatgcgagctatataagtttaagtatcaatgatgactatgtttaaataaaaaaaaaaaaaaaaaaaaaaaaaaaaaaaaaaaaaaaaaaaaaaaaaaaaaaaaaaaaaaaaaaaaaaaaaaaaaaaaaaaaaaaaaaaaaaaaaaaaaaaaaaaaaaaaaaaaaaaaaaaaaaaaaaaaaaaaaaaaaaaaaaaataaattgggggggccctttttaaaaaaaaaaattttataacccgggcatgaaaagaatttttctttttttttgttacaaaaaaataaaaatacgggcccggttttttaaaaaattgaaagggaaaaaaccggggggttcccaaaataaaatcttttaaaaaaaaacactttttttcaaggtggt

SEQ ID NO: 5223 - DNA, 351 bp, Lilium asiatic
gtttgatttgatcgatcaggccgtcttcatggcatccaagcggattctgaaggaagtcaaggatctccataaggatccacccacctcttgcagcgcaggccccgttgctgaagacatgtttcattggcaagcaacaataatgggtcctccagacagtccttatgcagggggagtctttctagtaaccatccacttccctccggattatccctttaaaccaccaaaggttgcatttaagacaaaggtcttgcatccgaatattaacagcaatgggagtatttgcctcgacatcttgaaggagcaatggagccctgccttgaccatattcaaggtgttgctctcgatatgttc

SEQ ID NO: 5224 - DNA, 413 bp, Lilium asiatic
acgcccacgcgtccgcccacgcgtccggtttgattgtgattaccccttcccctgatacccaacgatgcttatagtgaattgtacagatgatagtgtctattatttattctcgtgtttatggtctttttatattttttattagtgacggctatcaatgttagaagttgtatttctttactgctctggaattggaatgatatagataaaactctacaattttgcaacgaaaacaaaataataaactgtggacaattttttaatgaggacaagcatcttaatagagatgcaaacaactttattaaattaaaattatttgtttggcctaattaccgagttgaggatttagcttgggtgaattcgtactggttttgtctctatacagccctttttttttttgttggggctctttttta

SEQ ID NO: 5225 - DNA, 324 bp, Lilium asiatic
ggaaccggcagcttcggtaagcgcaggaacaagacccacaccctctgcgtccgctgtggccgtcgcagcttccacctccagaagagccgctgctcctcttgcgcctatcccgccgctcggatccgcaaatataactggagcgtcaaggcgatccgccggaagacgactggcactggcaggatgcgctacctccgccatgtcccccgtcgcttcaagagcaacttccgtgaaggcactgaagcagctcccaggaagaaggccgctgctgctgcttccttctaaagagtgagaacctggatttttcttgctcaatttagctcaatt

SEQ ID NO: 5226 - DNA, 336 bp, Lilium asiatic
aaaaaattcataaaaaaacgaaatgttgataagaataatttagacaaatccattgcacaacatagcgatatgcctgtgaatgaagaaaaaaaaaataattctaattttcttgttcctgaacatattctatctcatcgacgtcggagagagttgagaattctaatttgtttcaatttctggaattggaatgatatagataaaactctacaattttgcaacgaaaacaaaataataaactgtggacaattttttaatgaggacaagcatcttaatagagatgcaaacaactttattaaattaaaaattatttctttggcctaattaccgattagagga

SEQ ID NO: 5227 - DNA, 388 bp, Lilium asiatic
accactcctcaatcatgtcaggacgcggcatgggagggaaggggctcggcaagggcggcgccaagcgtcaccgcaaggtgctgcgggacaacatccagggcatcaccaagccggccatccgccgcctggctcgccggggcggagtgaagaggatcagcggcctcatctacgaggagaccagaggggtgctcaagatctttctggagaatgtcatcccgcgatgcctgtcacttacacagagcatgctaggaggaagacggtgacggcgatggatgtcgtctatgctctcaagcgtcagggccgcaccctctatggattcgggggttgatcttttcctgttcatctgggtctctgcttgcttttgaatttggatggtaggttgggttat

SEQ ID NO: 5228 - DNA, 172 bp, Lilium asiatic
attatttattcaattttatattgttttttttaagggtatttaagttgtaaagggtgattttgtgttgcatttttgtcgaaggcttgaagatgctgagttttgatttttattttgttgagagattggtctgtactgggaaggatttcaatatatactgggtattgtttgtatt

SEQ ID NO: 5229 - DNA, 424 bp, Lilium asiatic
gattttaatctcggagatatagcagaaaccatgcaagcatttgtaagcaaactttcaagctttgaaggagcagaggttcctgaggacaggaatacgaaagaagtgcaacttgatgttgaccaatttatgaaagagatggaatcagtgcttgagtcagcaccaaacgaaggacctcttgctgatgatgattttgaaggacatagctcctcgtctgaaatgaattttggtgattctgaagatgaaagtgatcttgatggaaatgaggacaatggcattaatgataccttcatgcactcctattctgatgctttgaacgaaaaattgaatgccaatacttttaaaagaaactttatgccggtagagaaaccagtacacaatgattgggaagggacattaaaagtggaaaatgaccaagaccaagagc

SEQ ID NO: 5230 - DNA, 358 bp, Lilium asiatic
cacctataaccccacccacaatccaccttctccacctttccttttccaccagttctggccagagaggagaatctcagattcctaagcggcggggttgggggatctcaggtgctcgccaatggcttctaagcggatcctcaaggagctcaaggatctgcagagggatccgcccacgtcctgcagcgctggtcctgtggctgaagacatgtttcattggcaagcaactattatgggtccccctgatagcccttattccggaggagtgtttctggttaccatccacttccctccagactatcctttcaaaccacccaaggtggcattcatgacaaaggtcttccatccaaatattaacagc

SEQ ID NO: 5231 - DNA, 406 bp, Lilium asiatic
ctttcttccatgtcacgaaaatctgttgcggctcacccatggcatgacttagaaattggaccaggggccccttccgttttcaattgtgtggttgaaatcagcaagggtagcaaggtgaagtatgagctggacaagtcaagcggtcttatcaaggtccagtcttttcattgcgtatatatattttcgctaaaaagttatcacttaattattaaatctattgatcatcactctaacatttttgttctttaaaaaaaataaagtactatattgtgtgtgtctaccctctctaaagctttcctagacttgacaactaaaagggaagctctcccactgcatgcttttcagatttgagtgctagaaattaaacaataaagctatgatgttttagttattacagaaatgtgat

SEQ ID NO: 5232 - DNA, 308 bp, Lilium asiatic
gcccatcctccctacatcgagatgatcagcgaggcgatttccacgctgaaagagcgtggtgggtcgagccagtatgcaatctccaagtttattgaagacaagcataaggctcacctcaccggaaacttcaagaagctccttctcgtccagctcaggaagtccacagctgccggcaagctgactaaggttaaaaactcttacaaagtggctgtgaaaccagctgctgcaaagaagcctactgcaaccaagccaaagtctggccctccgaaagcgaaaaaagcttctgggaaacccaagcctaaatctgc

SEQ ID NO: 5233 - DNA, 279 bp, Lilium asiatic
ctgctttcacaagagctactgttgtcattgttgtgaaatattccattgtcgaaagacctggaaaaatagatgaaatcctataccatgagatagccacattcttgatgcttattagagatagtgatcggcatgttagacgtgcggctgtccttgctttaagtacggctgctcacaataagccgaatctcattaaaggccttcttcctgagttgttacctcttttatatgatcaggctgtgattaaagcttgaattgataggactgtagaacttggtcctt

SEQ ID NO: 5234 - DNA, 324 bp, Lilium asiatic
  modified_base (241)..(241): a, c, g, t, unknown, or other
ccgtattctggatcccgtgggaggcggccttttggttttcgcggtggaaggggtggaagagccttttcgtcagcaaggagtggtgcttttgctagaggtcgcgggaatgttttccaacccagaaggcagtcatttgcacgagaagaggactttggtgtgccttttaatgctagatatgttgacgaggatccttacctctatgctgaagaaggtggacatggtgtcaaacgaccctactctntgatggagcaagattctggttacatggaacccatgagcagacttcgtgctcgatatgaccatcctgattcggtacatgggcgt

SEQ ID NO: 5235 - DNA, 324 bp, Lilium asiatic
gaaactctctgccgtcttcgccgcccccgctcgatcatggcgccgaagaaggagaaggctgcgccgtcatcgtcaaagcccgccaagtccggcggcgggaagcagaagaagaagaagtggagcaagggaaagcagaaggagaaggttaacaacgctgtgctgttcgatcaggcgagctatgataagatgattgccgaggttcccaagttcaagcagatcacaccgtcagtgctgtctgagaggctgaggatcaatggttctcttgcaaggaaggcaatcaaggacttgatggcccgtggtgccatccgtgtggttactgaacac

SEQ ID NO: 5236 - DNA, 370 bp, Lilium asiatic
aaaaaataaaaaataaaaaataaatttataagcttctagaagaaagaatatccaaagacattctaagaagcttctagaagaaagaacatgccttgaatattctcaaaagataattttggcaagatatttttttgtgtataaatagggaggtagaggggaagaggaaagatgaggaaaatgaaaaagaaaaatcaaggcaagaagagagaaggaaggaagaggagaaagagaaaatgagtgcatagctaataactagagagtgcaagtgcgagaaagaaaattttgacaagctttttcttagcgctttccatttttagcttgcatttgtgtctctggtctttcccttcggcattgtaaccttttttatttt

SEQ ID NO: 5237 - DNA, 321 bp, Lilium asiatic
gcagaacaggaattttatgctctaaatcgacgatgcaccatgcgggacgttaactgactgaagtgtatatgtcttgtggcggttacagacgacccaaatataagaaaaactgctataaacagtgttgtggggacacttgacttgagcatccggcgattcttacatgcgtaaaccttccgtggggaattgataaaacgccgtggattcctggttagtgtgcgctgtaatcagcacgaatgcgcttatgttgacaaactttgcgtgtgcaaactatataatctacacaagattgcgattaatactctccatctggagctgtga

SEQ ID NO: 5238 - DNA, 335 bp, Lilium asiatic
ggttggtgcccctgcccgcgttggccttgttgctcctattgatgtcgtggttcctgctggcaacactggattggatccttcccagacttctttcttccaggtgctcaacattcctaccaagatcaacaagggtactgttgagatcatcacccctgttgacctaatcaagaagggagacaaggtggggtcctctgaggctgccttacttgccaagctcggcataaagccgttctcgtatggccttgtggtggtgaatgtatatgacaatggttcggtcttcagccctgaggtgcttgatctcaccgaggatgatctaattgcgaggtttgctgctg

SEQ ID NO: 5239 - DNA, 372 bp, Lilium asiatic
  modified_base (234)..(234): a, c, g, t, unknown, or other
gaaaattacttttcatagacttcttcaacatttgtacacattttttcgtattctcttccattttacgaactttaaatacctatttttatctgctttcttgtcttgcattcctgacctttttcatttatttggatactgagagcaaagcaggagggatgatttggaatctcttggatttgtcctcatgtattttctaagaggaagttgagctatcctttctagactcatttccgnttctaatattctccttaatagtaacctcttattttcttagctatcctttttcgtcttcagtctttccttggcagggactaaaagcatggttgaaaaaaaacaattttgaaggatttatggaaaaaaaggtttcctttt

SEQ ID NO: 5240 - DNA, 322 bp, Lilium asiatic
aaaactggtccaaaccttggttcggcgccctcagagttccgtctcttgtgtgatttagccgaaaccactccatcttggacttttcgacacgttggaggtgccatgagaggtgctgtagccgaacaaagctctgtcctggttcgatcgttggtggaaagcaaagtgagcaataacgcgttacggttcttcaatgcccttggctataaactggatcacgaacttctgaaggtggggtttgccttccggttcgtgcggggtgctcagataactgtgacggtgacttctgccaacaaaatgctgaagcttcattcgggtgatgatg

SEQ ID NO: 5241 - DNA, 309 bp, Lilium asiatic
gcagccgctcgaagaaaacaggaagctagaaaggcaatcggcgaaaccctaagatgagggcgaagtggaagaagaagcggatgaggaggctgaagaggaagcgccgaaagatgaggcagagatccaagtagatgccgctgcaggactgtaatgcatgcatcgtggcttactgttggattaagttggctcttttattgttaagtttggtgttttaggggactgactatctggttcttttttgtttaaattatgaagcttttaattctcagttaatctaaatctttgcactacttacatgtttttgggtag

SEQ ID NO: 5242 - DNA, 277 bp, Lilium asiatic
aaaaaaaaaaaaataaaaaaaaaaatttaaaaaaaaaaaaaaaaaaacaaaaaaaaagaaaaaggcaaaaaaatcaaagggccaacaactatacaactctcataaaaaaacacaaacaaacaatacgggtcgccaattttttacatccccgccccctttataccccacgccctccccaaaaataccttaaattcacccattactcttttgcctgccctatttttacccagcacatttcttgtaatcgccatggcgaacaatcgtatttcttttacaa

SEQ ID NO: 5243 - DNA, 433 bp, Lilium asiatic
acgagctttttcaaagtttggggaggttattcaagcaagagttataaccgacaaagtttctgggtattgtagggggtttggatttgtaagatatgctacattgtgtgatgccgaacaaggcaagaaaggcatggatggtcagtatctggatggttgggttatttttgctgaatatgccagacctcgacagcctccgacacaacaatcatatgataatccatctggttattagttgtgctccaaagcacctacctggaagatagttgaaatggtatatttatctttgaaaaaaaaacaaaacatctttaacttaatttggcaaaaattttgaccccctgaacggggtaaacttaattgattgggaccccccaaaccctgaaatggccgtatttggtttttgaagaaaaccattccatttatttatattttgacc

SEQ ID NO: 5244 - DNA, 265 bp, Lilium asiatic
ctcccgcgagattcatacctccgtccgcctcgtcctccctggtgagctcgccaaggatgctgtctctgatgggaccaaggctgtcaccaagtttaccagcgcttaagctttggggtgtttctactgttctagggttctcatctggcatgtatttctttttttctatctcgaaaaaaaagaagcttgttggtcttttggtcctgtcttggttaaacatggatgtacgttggttggttggctgtgagtgtgattctgctcttttcat

SEQ ID NO: 5245 - DNA, 290 bp, Lilium asiatic
tcgcaatccccagtcctcaatccctttcaaatccatctgatggcgccgaaatccgatgagaagcccgcggagaagaagccggtggcggataatcccgccgccgaggaggagaagaagtcagccccggcagcggcagcggcggagaagaagccggccgaaaagaagcccaaggctgggaagaaggtcccggcctccaagggcaaggagggggagaagaagaagaagaggtcgaagaagtcggtggagacctacaagatctacatattcaaggtgttgaagcaggtccaccc

SEQ ID NO: 5246 - DNA, 238 bp, Lilium asiatic
caactatccaagcgagctccgtcggcgcaggtggtagatcggagcaattccaaatttcagatcggagcactttcacgagctttggcagggcaagagcgagctttgttctctctgagaggtgtcagattggagcaatttcagatctggtgagtatttttctgatcaacatgattgttatcgatgacctgggtagccattacgacggtacgtatcgcagcctctacaacctctacacaga

SEQ ID NO: 5247 - DNA, 245 bp, Lilium asiatic
gaccgaggcgtccgtatctatccaagctagctccgtcttttcacgtggtagatcggagcaattccaaagggacgtctgaacactatcacgtgctctttcatttcaagagcgagctctgttctatctgagaggtgtcacaatggaacactcttagatctcatgcgtatttttctgatcaacatgatagctataaatgacctgcctagccattattacaacacgtatttcagcctatacaacctttt

SEQ ID NO: 5248 - DNA, 212 bp, Lilium asiatic
tccactcgtcctctccactcttccttccactcttccgataaaaaaaaaaaaaaaaaaaaaaaaaaaaaagaaaaaataaaaaaaaaaaaaaaaaaaaaaaaaaccaatcattaaattaccattcttacataaatcataaattacttcttaaaaacttattaaaaataattcaatattttttaatttactaacctactattacacaaaatacc

SEQ ID NO: 5249 - DNA, 379 bp, Lilium asiatic
acgcccacgcgtccgtccacgcgttcgtgcccaataagagcgggactggcaaggagcccaaatggccatgcaaggccaccaagtcgccaaagaaggcatgaagatgagcgctttgttggacgtagcgtgttcttagagttggattatctactgatctcatctttgcggctttgttattggattttatttttcaacttcttgatgtatcagctatttagtaacgaggagtttgccgttggaaataagaatgcgctcctgtgatgccttataattcaacagctgttgtgtttgttactctcaacaggaccgctacacttgggggggccgttttaaaggatccaatttaatttcccccttcttttaatgcaaagtttttttt

SEQ ID NO: 5250 - DNA, 325 bp, Lilium asiatic
tgtcgtatggccgcgggattagcgtggtctcggccgaagtaccaacaatattttggggaaaatgcatgaaaactgtggggcaagacacgaacaggcttcaacaggaaatattgggattcatctcaccattcgagaaactcaagaagatgatacctactttaagttagttcgctgtgtattccaccttaagtcttctgtaagaacgggaagcatgggctccccgcttacacttcttcatatatttccccttccatgggtgcattctcgagtctttttccctcatccatttttggtttggggacgacaagtacctgcccgggcgggc

SEQ ID NO: 5251 - DNA, 371 bp, Lilium asiatic
gtggctctccgtgagatccgtaagtaccagaagagtactgagcttctcatccgcgggctccccttccagcgcctggtccgcgagatagctcatgacttcaaggccgatctccgtttccagagctcggcggtgtcggcgctgcaggaggcgtcggaggcctacctggtggggctgtttgaggacaccaacctctgcgccattcacgcaaagagggtcactatcatgccgaaggacattcagctcgcgaggaggatccgtggggagagggcttgatcatgttcagggtttctgattctgcaatttgatgtgaagatgtatgatgtttctcttatttgctacttgcgaatttgggggtctcaaagggttgtttt

SEQ ID NO: 5252 - DNA, 336 bp, Lilium asiatic
ttttgctgggcccgctcgtcggcacctacagttatgtccagtggtacgaggagaaggagaagcaggcccataggtactgagattcatcctgtgtcggtcacaatgtggcatcctcgttggtaagctctgtggtattgcagacgtggttgtttttttgtgtttgtattttgtagagagtgaatctcatactttgttgcaccggtagagattgtctggaaataaagaaacagttgtctgcattgattcttaagtcaggagattgtctgaattgattatgttgtggtaacttgcattaagcagattatgttttggccttgatgtttggttgggatttgg

SEQ ID NO: 5253 - DNA, 315 bp, Lilium asiatic
ttccccaatggatgagattgtgattgatgatcttactatcaaggttattttgcccgaagggtcaaaagaaatttctgtttctgttcctttttctacaaagcagcggcaggagattcattattcacacctagacattgctgggaggccagttgttgtccttgaaaagtctaatgtggttcctgagcataatttgcattttcaggtgtattacaagtttagcaacctttcactgcttagagagccaatgatgttaattatggggttcttcctcctgtttactgcctgtattgtctacatgcacaccgatatgtcaat

SEQ ID NO: 5254 - DNA, 287 bp, Lilium asiatic
ctgatacataaaaaaggaacgtcaattcattgtgacatgctacaccaacagataacatctgtgatgcttctggagctcttgttcaatccaatatatgcaccgttaagcctacaagtggatgttgtactgctaattccaaggatggaccaccaaactcatgtgcggaaatgccatcttcctgtcttcaaattaccggagatggaaatcgcgtgacacaaccgcacgatatggttaaccttcaaatgaggaaccattctatgctttcaactgggggattgggtcgatag

SEQ ID NO: 5255 - DNA, 349 bp, Lilium asiatic
cccacgcgtccggtcaatgtttatgttgtttttagcgcaatgattcactagttctccgggggtatgtcactgattcttaaaaaaaaaaaaaaaacgcaccatatcgggtaagaaaacatgggcattttgatcctagcactaatttttgatgtatatgtgagctaatgttttagattactcgaggttctaaaatgccaaaagccaaaattgttgagaacgtatgatatttataccacgtaaccattccatagcaaattaatgaagatctaagtcatcctagctctccaaatatgatcccaggtgctattattgacatcattatgtcattaaatgaaaaacatgctttatt

SEQ ID NO: 5256 - DNA, 441 bp, Lilium asiatic
acgcgataatctcatcctccccttccaaactagggttaaatcaatggtgaacaccctgagcaccaacctccccgcttccaagttcatatatatggatacttatcgcatgattaaggatatcctaagcaaccctacaccatacgggtttagcgtgatcgaccgtggttgctgcgggattgggcgaaacagtggacagattacatgtctgccgttcgagactccgtgttcgaacagagatcagtatgtgttctgggatgctttccatccaacagctgctgtgaatgtcatattggcaaggagagctttcagtggaagcactgatgtggtgtttcccatgaattgagaacaacttggtttggttgaaggaaaaaccaattaagaaccaagaagtgattggattaaggcaatttgattatggtagggagaaggtctggttttggt

SEQ ID NO: 5257 - DNA, 251 bp, Lilium asiatic
cgaactggtcatgcaggtgctaaatgcatggcctagaccaactttactcaatcaaatgcggggccttctaggtaactagtcaagatcctacaagacgctgggcatgattgagagtctagctattgactgcattgagcagatcttctggtggcgatgcgatccggatggaatttgcattcaaggagacagtggacgagagtacatgggtagggctacgaactcctgtttaccaaactgagtctaatgtgatc

SEQ ID NO: 5258 - DNA, 77 bp, Lilium asiatic
aaaacggggccgacccacgcgtccacaaactaaccattctcccttttttttctttttcttaaacaaatttactcaat

SEQ ID NO: 5259 - DNA, 357 bp, Lilium asiatic
cccactcgtccgcggacgcgtgggcgagaatcgggatcaactatggatgtagttggagcacaaacaaaagcaattgctgatcggatatctgactggaccaatgtagtgttggcctatgaacctgtttgggcgattggaactggcaaagttgcatccccagctcaggcccaggaagttcacattggtttaaggaaatggcttagtgcaaatgtaagtgctgaagttgctgcatcaacaaggattatatatggaggttcggtgagcggaggtaactgcaaggaactggcaggacagcctgatgttgatggatttcttgttggtggagcttctctgaagccggagtttgtggacatcatc

SEQ ID NO: 5260 - DNA, 412 bp, Lilium asiatic
cccactctttctctgtactcttgggctataatcgggatcaactatggatgtagttagaacacatacaaaagcaattgctgatcttatatctgactggaccaatgtatagttggcctatgaacctgtttgggcgattggaactgtcaaagttgcatccccagctcatgcccaggaagttcacattggtttaaggaaatggcttattgcaaatgtaagtgctgtagttgctgcatcaacaaggattatatattgaggttcggtgagcggatgtaactgcaatgaactgtcatgacagcctgatgttgatggatttcttgttggttgagcttcttttaatcctgattttgtggacatctataaagccttttactggtgaaaaatttttacttatagatctttttaaacctttttt

SEQ ID NO: 5261 - DNA, 366 bp, Lilium asiatic
tcgaagcaacaacgaggccatttgatgggtcacactttatatatagtcgtatgttgccgtcgtcaaacctaataacgataccatttgatggaacacaaattaactatatgtcttatatgtcataattcattaaaaacctgcaaatgtgtggagtattaagtatagtggcaggtatgagtttccatccacctctgatggggaaaatgaacaaatgattgcgtctggctcgaaaaaatacttaggatggactacccactcacccaaattcgagcacgaacagacggtgaacgagttctagaataacatcaaaatcattctttagtgatgattttactataaataattgttgtgatactctatgaaatt

SEQ ID NO: 5262 - DNA, 310 bp, Lilium asiatic
gctgatcttatactcatcacactcaatttagattttatagtcaatagttgtgatctcgaacgctatctcgaagatgtctgcaaagacggccagtcagtcgtccggctcctccgccggagctgcccccaccgatgagcggaagcgcaagaggatgctgtcgaaccgcgagtcggcgcggcggtcccgggtgaagaagcagcggcatctggatgagctgatcaagcaggcggcggagctgagggaggagaatgctcggatcgtggcgcggacggatcagttgactgcgcggtacatgatggtggagccggag

SEQ ID NO: 5263 - DNA, 76 bp, Lilium asiatic
actgtagtgcatttaatttttattttatagtcaatatatataaacttaaacgctaggttgaatatatttttaaata

SEQ ID NO: 5264 - DNA, 193 bp, Lilium asiatic
ggagattcttcaggtttagagggcaagaggtcagtgtaaacagtctaaactaaagagctggctgacatgacatgcatttttcaagatgaagactgcttattctatgtaagagcatgtggaggtacagcatgtggagtggatatatggattcgatgattgcttaagtcgacgagcatgtcatggttatatatgc

SEQ ID NO: 5265 - DNA, 181 bp, Lilium asiatic
gaaaaaaaaaaaaaaaaaaaaaaaaaaaaaaaaaggtcgaacgcttaaaggccaagtgagtaactgcactcacgcctaaaactctataaagtacctaatgaatatatggccactgtttacaacgtaagctgagaaaacgctgcgttaacaaaataattccttaaggacatagatctttatc

SEQ ID NO: 5266 - DNA, 381 bp, Lilium asiatic
atgtgattttattttaatattggatacctatattacaggctccaattagtttagagtcaaaacttttctttcttcaaaaaaaaaaaaaaaaaaaaaaaaaaaaaaaaaaaaaaaaaaaaaaaaaaaaaaaaaaaaaaaaaaaaaaaaaaaaaaaaaaaaaaaaaaaaaaaaaaaaaaaaaaaaaaaaaaaaaaaaaaaaaaaaaaaaaaaagggggggccccttttaaaaaaccaaattttactaccccgtgattgcaaattaaaattttttttatagggcaaccaaaataaaattaatgggccgtgttttaaaaacgtggtaactgaaaaaaccctggcgtaaccaaaatataaacgcttttaaaaaaaaaacccccttt

SEQ ID NO: 5267 - DNA, 375 bp, Lilium asiatic
cccacgcgtccgatcaaacaacaattagatatcgatggaagctgaagatctacttaatgcctcatggtttcttaaccgaactccggcccgaaagagctctttgaagaggagttagagtcccatagaattccatagtttaaaattaagagtaaaagtattgattaaagttaagagaagcttttacgggagagggtagagatgagtcatcaagaagctaatcaatattaggagtggaacaataaataccttagaggtcttccgttattaaataaatagtttgtaattttttacgtaaatcaatggaatacacaaatattataaagttggagataatgcacatgccgtaaataaaaaaaaaaaaaaaaaggggggccg

SEQ ID NO: 5268 - DNA, 387 bp, Lilium asiatic
ggcggatggccaggggattagcgtggcctccgccgtagatcaccttagagcgttgctgaatgatacaaacactactgcgcaggggtgcaacgcaaatggtgaactatctggtgtcgtagactcaattgaacgatcaacatcttactaccaaccaaacatgctaagacatcttgatagagaaccaaacttgcgttctaggtaaaaaccaacagcgccaatcctgtgaccaagctgacgtctgaaaatggcgtcgattgctaaaggtgccttgctataatggacagtgaagagaataacttatccgtcaactaaggaattgccacctacaaccatctcctcactaaagctggtaaatgccaatgtgcgcactgcgccgtcaaatttacc

SEQ ID NO: 5269 - DNA, 325 bp, Lilium asiatic
cccacgcgtccgcccacgcgtccgggcggagctcagcagtaggattcagctcaaagctgaaggggaggaaaagttccattccttccatccagtggctacaattctcagttacctgaccaaggcccctcttgttcccccgggtactccagtggtgaatgcattgtcgaagcagagggcgatgctagagaacatcatgagggcttgcatcggattggcgccggagaacaacatgatcttagagtacaagtgagatgagttctaaccgagttgggagcggttggggaaagtttaggaagggaaaaggcaaagcttatcttttttttct

SEQ ID NO: 5270 - DNA, 324 bp, Lilium asiatic
cccacgcgtgcgctcaagcattcggaatgttctgacacttgccaagcaactgaaagctgcaggggtggaaaaggtcgcatgtccttccataccagcgttacaagctttaatgacctaaccagggtcatgtttcttgagccgcatactacagtggtgaaagcattgcctaagcaaaacgcaatgctagagaacattttgagggcttgcatcggattggcgccggagaacaacatgatcttagagtacacgtgagatgagttctaaccgagttgagagcgcgtggggaaagttaagaaaggaaaagggcagggctaatcttttttt

SEQ ID NO: 5271 - DNA, 332 bp, Lilium asiatic
gaatgatttgtcactaaagaacttggatgagttccatactgaactgcaagaacttcagaaagaaaagagtgagagactgcagaaggttctggattttgtaagcacaatacatgatctatgtgcagtcttagggatggatttcttcagtactatagttgaagttcatcctagccttaaagactctgtcggtgtgcaatccaagagtatcagcaatgatactttatcaaagcttgctaagacagtgatagaacttcaagaagataaacgggcgagattagaaaagcttcaagaattagcaggccagctatccgacctttgggatctgatggata

SEQ ID NO: 5272 - DNA, 357 bp, Lilium asiatic
aatcccctcaatcatcgtctctcgctctcagcaatggccggacgtggcaaggcggtcgggggcgcagcggcgaagaaggcgacctcgaggagcagcaaggccggtctccagttcccggtcggccgtatcgcccgcttcctcaaggccggcaagtacgccgagagggtcggcgccggcgctccggtctatctcgccgccgtcctggagtatctcgcagccgaggttttggagttggctgggaatgcggcgagggataacaagaagactaggattgtaccgaggcatattcaacttgctgtgaggaatgatgaggagctttcgaagttgctggggatggggacttttgttaaggggggg

SEQ ID NO: 5273 - DNA, 290 bp, Lilium asiatic
gcgcgtcaacttgttgagatcgagtgagtggtggtcaatggcattgatgtttattacctgttgaccggcaatcctgttgatctgtgcgatcgtgatctcagcctcgggaaagagtattggggagcactcaggtgatctgtcgagcctggtggtccagcagtacaatactggatcgatatacggatccggagattttattttcgccgtggagttgaagaacgtgtacctctgcactgtgacatatgtgacactatggactaatgggtttgtcagttcaatggagattgatc

SEQ ID NO: 5274 - DNA, 336 bp, Lilium asiatic
aatgtcaacttaagcatcctccaggcgatgagatctatcgtagtggcactctttcgatgtttgaggttgatggcaagaagaataaggtttatggacaaaatctttgctatttggcgaaattatttcttgatcacaagacactttactatgatgtcgatttgtttttgttctacattctttgtgaatgtgatgagagaggatgccacatggttggatatttctccaaggaaaaacattctgaagaggcttataacttggcctgcatccttacccttcccccataccaaagaaaaggatatgggaaatttctaatttccttttcatatgaactttcaa

SEQ ID NO: 5275 - DNA, 378 bp, Lilium asiatic
  modified_base (22)..(22): a, c, g, t, unknown, or other
cactcgtgccgatggcatcggngctcttttccgtgaagggacggcgtctttgctcaactcaatggctaataagaagtttgtgttcactactcagcaagtgagggatggcttcactgcggccgtgggatcgaacaaggcagcggagtcgcaggcggagctattcaagcaggccaatgaagggcactttaagcactagatgatggattgaaggggatggtctttaggtttaatgttcatgttatttcatgttggttgcttcctaggtttccctcttgtaatgggactgagctttggtcactatgatgtctagctatgagttgtaagagtttgagaaatccactacatgggtttaacctttcccaaatgaatcctaaatca

SEQ ID NO: 5276 - DNA, 420 bp, Lilium asiatic
tcgcccacgcgtccgaaaaaaaaaattttttaaaaaaaaaaaaaaaaaaaaaaaaaaaaaaattttttaaaaaaaaaaataaaaaaaaaaataaaaaaaaattttataaaattataaaattatttttataattaatataattttgttttttttttttttaattttttttattttatttttagttatcctaaattttatttttttaattttggtttttaattttattttccctttttcattttttttaactttttaaatctttctttattttattttttttcttatttttcaattctttttttattttttcatcccttttcgtctttttattcttttttctccatttttttttttttatttttaattaattttttttgttttttttttttttatccttttttttgtttttttttttatttt

SEQ ID NO: 5277 - DNA, 371 bp, Lilium asiatic
ccggacgagaaacaacataacagctatcttgaataggatgaatgagacccctggaataatgagtcagatgccgcctttgcccgtatcaataaatgatgatcttgttggtaccattttccctagtacaagtcccattttccctagtacaagtcagccgcttttttttggtactccgagcagtgtccatctgaagcaggagccgagatgctgataaaatatttactgagacgagatgatgataaattatttactgagacgaggggtgttcaaccccatgtaattacacggtttttcttctgtaaatgtttgagctatgggagctctctcccttgtgtacacacatctgagatcaggaatatgtaaagatccca

SEQ ID NO: 5278 - DNA, 392 bp, Lilium asiatic
ggccggaatccgggtcgcgcagcgtccgaagaagccaagtaaaataaccagtctgaaaaagactcagtccccctaaatctaagtcttgcagcaagaagagtttgagatagtaccagaagagccgatgcaatcgagtgatgactcgtcatccgatgaatcagaagatttggatgaagaccagaaggccgagatacttgcttatgcaaagaagatgctgagaaagaagcagagggagcagattcttgatgatgcctacaacaaatacatgtttgatgacgaaggtttacccaactggtttgcgaatgaggagaagaggcactggcagccgataaaaccagttaccaaagaagaagttgcagccatgaaggcacagttcagagaaatcgatgccc

SEQ ID NO: 5279 - DNA, 372 bp, Lilium asiatic
gtttttgttgcttaacgagggaatcatggtgatttattgggggaaccacggaaggagttggaccgaaagtggtatgctggggctataaaaagggaagggtataaacagaagaaagaagctgggtggtggactgcggtggaagtagcatagcacagaggaagaagccggtggtggtgacagcacacaccacttcctcctttgatctcatagccagagggaccagtgggtttgtgatttgtaatctgaggtcgttcaattaatagtttgtgttgattcgttgttattcatttgtgatttgagatctagtgactgctattcagactaagcttgtataattagggtgcaacactcacttcttggtgtgacaggctg

SEQ ID NO: 5280 - DNA, 380 bp, Lilium asiatic
cccacgcgtccgcggacgcgtggggaggccaagctggcacatcgaatgcagtgccagcgagctccagtatcttggacattgcttcgatatacatggcggagggaaggatctgatatttccccatcatgagaatgagctggcacaaagctttgctgcttgcccagagagcaatataaactactggatgcacaatggtttcgttaacagggacaatatcaaaatgtccaagtccgaaagtaacttcttcactattcgtgatatcattaaaatgtaccatccattagctctacgatttttcttgatgcggactcactatcgagcagatgtcaattattctgatagactactacaaaatgcatcagaccgtgtctacaaaattt

SEQ ID NO: 5281 - DNA, 350 bp, Lilium asiatic
cggacgcgtgggttgagggaggccaactgcgctagcgtctgccaaacggagggattcaaaggaggggtttgcgagggcatccgccgccgttgcttctgcgaaaccgactgtcactgaggcctgagctctcggctttaataagtaatgtcggactatttgagaagaataagatggacctggtggtgttggttttacagtctcttcttcggtgtggggacttgaatactttcttctaggtttctgatatgtagttgtttgtgtctaggttgagctgtagggctgtgttctgtagttggatttgtggtggagtaagttctcttgtatttgattgcttattttaattgaacttt

SEQ ID NO: 5282 - DNA, 317 bp, Lilium asiatic
caaaggcgcctgttcccctttgtggataacatgtattcttgagaaaacatcttttaaactctctaaaattgtttggtattttttgaaaaaaaaaaaatgaaaaaaaaaatgaaaataaaaacaaaaataaaaaataaaaaaaaaaaaaaaaaaaatatataaaaaaaataaaaaaaaacctggtggtgttggttttacaatctcttattatggtggggggacttttaaaaaaaacaaatattatctccccgggcaggcaaaagtaaaactttttttttatggccccctaaattaaattaatgggcccgcttttaaaa

SEQ ID NO: 5283 - DNA, 371 bp, Lilium asiatic
gtacgcgctgagccggatccggaatgcggcgagggagttactgacgctcgacgagaggaatcctcgccgcatcttcgagggcgaggcgcttctccgccgtatgaatcggtacgggctcctcgaggagggacagaacaagctcgattacgtgcttgcactcaccgttgagaactttcttgagcgccgccttcagactcaggtgttcaaatcgggcatggcgaagtcgatacatcatgctcgtgttttgatccgtcagcgtcacatcagggttggccgacaggtggtgaacattccctcgttcatggtgagagttgattctgctaagcatattgattttgccctcaacagtccacttggaggatgtggccctg

SEQ ID NO: 5284 - DNA, 306 bp, Lilium asiatic
  modified_base (290)..(290): a, c, g, t, unknown, or other
tgggcactaaaagagctcaacatgttgtaggcgggtccaagaccgtctaaatgggttctaagagagcgagctaggtgggtcgatctggacgtgtatggtataaagaaaagatatcattgtgagtatggatttactttagttgcttatatgtatttaaccccatcactttgatggaactctatacgagaattgacaaacaatgagaccaatgaagaagattataagatggtctttaaatgcaatgaaaaaagagttttggtgggctataaagaatgacaaatattcaaagnttatcttttttttctc

SEQ ID NO: 5285 - DNA, 339 bp, Lilium asiatic
aaaaaaaaaaaaaaaaaaaaaaatttttaaaaaaaaaaaaaaaaaaaaaaaaaggggggatcttttaaagggaaaaggggttaatggcccgccctttttaaggctccaaacttacttacccctgcatgcgcccgcttaacttttctttaagtttaccttattttaatttcaaggccctccttttttcaacgtgaaacttggaaaaacctaacggttcccaacttaaatccctttgaagcaaatcccctttccccaacctcccttattcccattaaggcccctcccttttccctttccaaacattttgccacttaaattggcaattggacccccccttta

SEQ ID NO: 5286 - DNA, 378 bp, Lilium asiatic
gtcgatgaagggtttgctctcccttgtgctggctcttgcactggctcaggcctgtgcgaggagcactccaggtcaagtcagtgtcagcacaaaccacgctgacagcgccgctgccggcgttggtgatcaaaagaactttttctatgctggaggcattggtgggattgctggcgggggtgttcccggactcggctttggcggaggtgttcccgtcgttggtgctggtgttggtggcttgggtgggctcggtggtggcattggaggagccagcggcctcggggctggtgccggcagtggctttggcggtggtgcaggtggtggcttactaccatgagttgggtgttggtttagtttacgcgagtaatgcatgcatgcagt

SEQ ID NO: 5287 - DNA, 179 bp, Lilium asiatic
cccggaaatacccgggccgaccaacccgtccgcggccccttggccgaccccttggggcccttaccaaatttggttttggggggttgggctgaaaccattttttccagtggccttcgaaccttttggttctaatttggcattggtctttggtatgcccatttatgtctaagggtttggtt

SEQ ID NO: 5288 - DNA, 230 bp, Lilium asiatic
atagacacaaatgacgacgcgagcaaataactcacactcacgaggagataagagaacataacatcgacacccaaagatgcgtagaagattgtagcccagtggaggggagaaaatgtgggtatccggtatgacaaccggaggtggggccggaagagaagaccaaagaggctcatcaactggagcatgggaatgtgcaatatgagaaactggggcaaaaggagacattctcg

SEQ ID NO: 5289 - DNA, 78 bp, Lilium asiatic
tgagttggctcttaattctgctagtatcgtgtattatgggaaccattactcgtgtgatgcctatataagttttgaatg

SEQ ID NO: 5290 - DNA, 314 bp, Lilium asiatic
gaaggttgctgtggtactttcaaacttcccgttaagatctcattcggtttgaagcatctgaagtcctgaaaggtttagcctgtctgccttaccggggcggctgacagattggtggattcacctggggggaacctttatggtttagtttcacaatggtgcgaagttacgaggaagaactgaacactgtggaactgtgtggctgtgtgagtcgtgctatggatcgtggacttgggcggatcacccgttgtgtttggacagagaaaactactgatgggttgtcacaggcattgtgaatcatcataccgagtactttg

SEQ ID NO: 5291 - DNA, 381 bp, Lilium asiatic
catctctgctatcactcttctacttcctgttcttaccaccttcttggaagcatcgaactcggtgaaaggtgggagcatctcgtttaggggttgcattcagctctttggcttctgtacctttgaggcatgtgtcgggattttctggccatcgattatgaaaatgagatctcagtacattcctgaagaggccaggagcacaattatgaacttcttccgtattcccctcaatatattcgtctgtatcgtgctttacaatgtaagtgcgttccctatcaccgtcatgttcggcatgtgttccattttcctcttcatggcctccatcctgcaaaggcgtctcatggtggttgctgagatgcatcgatcaaagtcgcaagaatggtc

SEQ ID NO: 5292 - DNA, 395 bp, Lilium asiatic
cccacgcgtccgcccacgcgtccgcccacgcgtccgcgcagagaagctaagagagatcgggtttattgtctactcaatcgggaagccattggatgcatggctcaaggacatgcctgctgtggcctaaaaagggaaatttactggtagaaggcgagacagagcagagatcggtgaaatttgagtagctcgttcaattcatcaggtttggtttaaggatttttcataattgttggtgtcctctgacaagatttggtattttgttatggatgtctttgcctcctgtcctgctttgcactcctagtcttgagtgacttttgttgcggttaaattagagcttatatcttgttaggtatccctatttcatctgcatgtacccatgctactgaggagtttgg

SEQ ID NO: 5293 - DNA, 227 bp, Lilium asiatic
agtctatagactacaaatggctggattggaggacaagcttacccaggagcccattgatcccctgggcttggcaacgaccccgaccaagctgcattactcaggtgaaggagatcaaaacgggccctggcgatgttgcgatgctcggttcttctgcagcctatgtcaggagaagggccagggaaacctcacaaacatctgatgacccatttggaaaacttgctactgga

SEQ ID NO: 5294 - DNA, 371 bp, Lilium asiatic
cgaaaaggctacagatggggatgggattggacctgaggacgaacctgctgtgggggtcgagcctactgttgggggatccatctcgatcgatctcccgcacgaggacggagccatggacatctcctccaagacgccggcggatggtgggaatctgtttaagggagcacggaagcgcaagtctggcagcataaggagattcaagcaggagctggcggcaggtggtctggatgggggagcagcggcggcgaagctggataacaacggtgcttgcggtaaactgtccggtactgaatttgttgattcgactgatgatgctggtgaagaagggggtggccgcagatgtcgcggcggatcctaaacttccaatcact

SEQ ID NO: 5295 - DNA, 238 bp, Lilium asiatic
taaaattttcaaagaatcaatcgaagaagaaccacaacatgctgagaaatctatggagtaccagaacaagcgcggtgtttacgtgaaactccaatctatcttgtgcccccctactgagttcgaccaccctgataaaggacatgcattgcatgccatgcagttacctctttctcttgagaaactgactaatgagaagcttctcaactcacatcggattgcaaaaagttccaatgatcct

SEQ ID NO: 5296 - DNA, 185 bp, Lilium asiatic
  modified_base (54)..(54): a, c, g, t, unknown, or other
ggaaatacccgggccaaccaacccgtccaattttaataacgcgtcctaaatgtnttataaaaaaaaaaaaaaaaaaaaaaaaaaagggggtttttaaaaaaaaaaaaaaaaaaaaaaaaaaaaaaaaaaacaaaaaaaaaaaaaaaaaaataacaaaaacttaattagggccgcccgtttaaaaa

SEQ ID NO: 5297 - DNA, 400 bp, Lilium asiatic
gatcgacagacgctctggtaaggaaattttttaaggagcccaagtttttgaagaatggtgatgctggattcgtgaagatgattccgaccaagcctatggtggtggagactttctccgagtatcctccgcttgggcgttttgctgttagggacatgcgccagactgttgctgttggggttattaagagtgttgagaagaaggatcccactggtgccaaggtgaccaaggctgctatcaagaagaagtgaggtgttcttctatttatgtccgagtttcttaagaactgcaagagtctagttggtaatgcttgtttttgtttgtcgaactttcgtgttgttaggtcagtggtttcgatcaaactatttgctttgctgctctatttggtcttttgttatgaata

SEQ ID NO: 5298 - DNA, 389 bp, Lilium asiatic
atcaacgagcagatcaatgttgagtacaatgtctcgtatgtctatcacgccttgtgtgcttactttgatcgggacaatgttgcgcttaaaggccttgctaaatttttcaaggaatcaagcgaagaggagcgacaacatgctgagaaatttatggagtaccagaacaagcgtggtggtaaggtgaagctccagtctatcttgtgcccccctactgagttcgaccaccctgagaaaggagatgcgttgcatgccatggagttggctctttctcttgagaaactgacgaatgagaagctcctcaacttacatcggattgcagatggttccaatgatcctcagttggtggattttgttgagagtgagttcctcggggagcaggttgaagcaat

SEQ ID NO: 5299 - DNA, 387 bp, Lilium asiatic
gtttgtagggtgggggatacatgtgttacgttgatgaattctcctatcacctcttggacttccaattggcttgggttttgtggacccccctatccattccgctagtgatgtgcattgtaacttagtaacaagagagttgatcactatatgtcattcgaataaaggaaatatcgaaggagggagttccctctttagcaagttaggtctaccaccttttcccgtgggatcagcttctatattctaaagagcgcttgatcaaatccttgtttccagctgacctcatttagttgtcatgatgattcttgcttagcaaagatcactagcaaggtaattgctagcatcaatatttttggtgggcttctaatctatgtagcactgatagggata

SEQ ID NO: 5300 - DNA, 271 bp, Lilium asiatic
ggggcaagggcgggaaggggcgggcaagggcggcgccaagcgccaccacaaggtcctccgggataacatccagggcatcaccaagcctgccatacgacgccttgctcgccgaggtggcggtgaagaggatcagtggcctcatatacgaggagaccccaggggcgctgaagatctttacggaaaatgtgattcacaatgccatgacctacactgagcacgcccgccacaagacggagaccgcgatacatataccgtatgcgctgaagaagca

SEQ ID NO: 5301 - DNA, 405 bp, Lilium asiatic
aagttctggagcaagtgcaggttgactatgaatcgatgcccggttggcagagtgatgatctctactattcggaactacaatgatcttcctcttgctgctcgtcgatatgtcgagagaatagaagagctggtcggtgttcccattcactatattggtattggaccagggcgcgatgctctcatatacaagtaatttgagggttgttcaggtgaatttcattgccctaatttgaatattgcttcagtggttttgcagtaacagttgctttttcatactgtattttggcagtaaaatctggtttactttatttcctgtttggagggtatggcccaactatctgtagtagagctgctattgaacctctgtttattaggttatctttagtagagctgagtttcttattat

SEQ ID NO: 5302 - DNA, 231 bp, Lilium asiatic
catgatgaaattacttacaaggcattggatggtgttcaaattgtaaatggctgggagtgtaagatatcatgcacttcctctaaggtttcttatgttctggacaccgaagattatttaattcgcacacaaaagaggaagcgccattcatatggagttgctgcttcttgtcgtgaccgaattcaatttgctaaaaataacaatgtcaaagtacagcgacttcgtcgctttata

SEQ ID NO: 5303 - DNA, 252 bp, Lilium asiatic
  modified_base (226)..(226): a, c, g, t, unknown, or other
catccagggcatcaccaagcctgccatccgccgccttgctcgccgcggtggcgtgaagaggatcagtggcctcatatacgaggagacccgtggggtgctgaagatctttctggagaatgtcattcgcgatgccgtgacctacactgagcacgcccgccgcaagacggtgacggcgatggatgtggtgtatgcgctgaagaggcaggggcgtacgctgtatggcttncgcggctgatgtgtttggtcttctgc

SEQ ID NO: 5304 - DNA, 387 bp, Lilium asiatic
  modified_base (10)..(10): a, c, g, t, unknown, or other
  modified_base (13)..(13): a, c, g, t, unknown, or other
cccacgcgtncgnggactcgtgggcggactcgtgggaaaagcttatgcatgaccaggaggacctgataagctgtcttttgcaatggtgttatacaagttatggagaggttttcagcgcatggatgcacttctgtgctgtgcgtgttttcactgagagcattcttagatacagtttgccaccgacattcttggctgcggtactggcaccatccgcgaaaagcgagaagaacgtgcgagctatcttggaggatctatgcggcaactccaatagctattggaaatctgatgaggaagtcagtattgtcggtctaggaggcgaagctgaaacttatccctatgtttcgttcacaattaacatcgtttaattcgtgtgcaccgactcgtctt

SEQ ID NO: 5305 - DNA, 108 bp, Lilium asiatic
gtcgcccacgcgtcgtgacggagcggcgtctagagatcagcttacgtcgcggcatgcacggatacttttataggcactaaatcaattcatggcgcgtttacaacgcgg

SEQ ID NO: 5306 - DNA, 299 bp, Lilium asiatic
ctgacattctaagccgatcaccgatgtcgggtcgaggcaagggcgggaaggggctgggcacgggcggcgccaagcgccaccgaaagggcctccgggataacatacagggcataagcaagcctgccatacgacgccttgctcgccgaggcggcgtgaaaaggatcagtggcctcatatacgaggagaccccaggggcgctgaagatctttacggagaatgtgattcacaatgccatgacctacactgagcacgcccggcgcaagacggagaccgcgatacatgtagcgtatgcgctgaag

SEQ ID NO: 5307 - DNA, 394 bp, Lilium asiatic
ctgcaagattgtaaacccaacggaactaatcgaaccctagagagagatgagctcggcgtcgccgctgcttcgtacgatctcgctgctcctgaggttgcctgcctatggagtcggctgcgggatcaggaaagcggctgcccgctacccggatttccgacaatggatcatcgatttagagatgaagacgccgaatactaccgaatccagcacaattaactgtgccgcctccgaggccagccatggtgccgttggtactgagacactaccttcgactgaggaatttcttcaaactgcttctcattttttcggcaaagtcattgtctattcggttgctggaggcattttcttcgtgcgatcacttgacatgtcacaaattatagaggtgggacggata

SEQ ID NO: 5308 - DNA, 220 bp, Lilium asiatic
  modified_base (114)..(114): a, c, g, t, unknown, or other
tcttgtcctataagctgacctaactgattaactcagagacccttaagtcacccttaaactagagaccacttaagtaacaccctttgcttataggggggctggtcttacagtttnatgctactgcgaagaaaactaaactttcaattctacacctgatggtagagcttaccttatcgacctcaaactaacatgctctcttgtagtgcttttgaaaaagatt

SEQ ID NO: 5309 - DNA, 313 bp, Lilium asiatic
  modified_base (19)..(19): a, c, g, t, unknown, or other
  modified_base (28)..(28): a, c, g, t, unknown, or other
  modified_base (31)..(32): a, c, g, t, unknown, or other
  modified_base (49)..(49): a, c, g, t, unknown, or other
cgtctcggtcgcgcggtgnaagctcggnagnnattttcggctggcattncgcggcactccgcgccgatggaccgaagggcgacatataaagggaagccggtcccaagaccctcccgaataaggcaaggaactggtaagatctctttcccccttcatcttgcctcaattagggttttaaaatgttctgaatcaccaaacgatttcttaatttctatgtttttcctatttcttcttcatgtctgttgcattaggctgcagggtttgacataatgtttattttaagactggttatgtttgattggatagtaagacc

SEQ ID NO: 5310 - DNA, 268 bp, Lilium asiatic
cccacgcgtccggcaagtgtggcaagtgagctctccatgagaggaggatgtagggggtgataccctttgtttacttgtttctgttgtagtgctgaataatggccatggtttacatgatgcaagcttttttgcaccgtgagtggttcaccagtggcttctagtgtcttgtggtggtgctgtgttggttttgtatggtctgttgaaattactgaagtgttgtttttagtgttttatctaaatggaatattattaagtaattatcatcttc

SEQ ID NO: 5311 - DNA, 196 bp, Lilium asiatic
tccgaacatcttggcggagaactgtgtcgacatcaactgggacaagggtgacatcttgttgatcaacaactaccattgccagcatgctcgccgcgctggcaagccgccaaggatggtgttggtttctgtggcgaattgaggtttgggtgtcgataccgtttctttgagtcctttgtttggagcagtagtaaacttt

SEQ ID NO: 5312 - DNA, 385 bp, Lilium asiatic
cccacgcgtccgattcgcctcaaccaacaaagatcaatggggcagtccctgaagaagttgacagcaagcagagacgcagataaattggcgaaggaatctgaggaactcaaagccttgcttcagaagtatattgacgagaactttgcaaaatacaaaattcaaagtaccgttgatctctaccatgcagtatacgatattattgaaaagataggcgaaatgaatggggccatgcagttcaagattccttctattgagagtttgaaaatccaatttgataaggtatatacagatcctagcaagccttttagcaagaaggaattcaacaagattgttacagaattgatatcatatgatagtttctttattgggaaagcagcaaaagata

SEQ ID NO: 5313 - DNA, 378 bp, Lilium asiatic
  modified_base (303)..(303): a, c, g, t, unknown, or other
actctacacctaatccgtccaagggcccgaaccaaacagacgtggcccaagtccaccggaggcaaggctccccggaagcaactcgcaaccaaggcagcacgcaagtctgctccggccaccggcggcgtgaagaagccccaccgtttccgccccggcacggtggctctccgtgagatccgcaagtaccagaagagcactgagctcctcatccgtaagctccccttccagcgccttgtccgggagatcgcccaagatttcaaggccgacctccgcttccagagctcggcggtgtcggcgctgcangaggcgtcggaggcctatctggttgggctgttcgaggacaccaacctgtgcgccattcacgccaagagggtgact

SEQ ID NO: 5314 - DNA, 148 bp, Lilium asiatic
ttttaagtctctggaatatacttaggaggcagcggatttatttgttaggagaagacaagtacttgatgtaattttgttttatcttttctggagatgtcgagaactttatgggaatttaatgcaaatcaagaagcgtgtattgatttgt

SEQ ID NO: 5315 - DNA, 399 bp, Lilium asiatic
ataactctcacagttcaatttcttattatatatcacaaatacatatccggtataaacaactccacaaatctccattactctgaactattcaaaccacacaactctactatacaactttggtacttagtcccccaaaccactcactatctacaatagcaaccccaaactcacagcatcaacacacacaacctcctgcgacattctaaacattgtcaactccactacttcgcggaacctatcaagtcaacacttgggtttgataattttcggttgcgaaaatccatacctcataacgaggttaggacaaagactagagtaagcattaagttaactcatcaacaaggagactattacctaatattccaatgaatattgtgtaataggccgcaacaagcatta

SEQ ID NO: 5316 - DNA, 320 bp, Lilium asiatic
aaagagagttagggtccagggcggttagaggtactcaaaaggggtaaagttcaaaaaagtaaatatgcaaaatcatttatagtcaatgaagcatataaactcaaggaatatgtttgaaaactttaacaaagactattcattcaatattcaaaattaactaaaaaggttcaaaccttgatataatgaagacatttacaatcatattcgaacttctagttaaactatttaaaagcagatgtaactaggactttcaatttctaaccaatcaataattcaattactaagcttgaaatcctagtcaaactatccaatcatccatg

SEQ ID NO: 5317 - DNA, 59 bp, Lilium asiatic
  modified_base (3)..(3): a, c, g, t, unknown, or other
tcnaaaaaaaattaaggtcccaaaaaaaaaaaaagtactcaaaaggggtaaagttcggg

SEQ ID NO: 5318 - DNA, 381 bp, Lilium asiatic
cccacgcgtccgcgctcagatggtgatttacatcatttacaaaagcagtgcaaagaaggtaactatcgcgcaaggggagcgactgcccgagcatgttgtggccatcacgaagctcagccctgctccaaactcggacgtggagaaggcccttgctgaggagatgaagatcagtggtgatgagagcaccgtgagccttccggtggagaagggcctcgctgaggagatgaagatcggtagtgatgagagcacggtgaaccttccggtgtgaatgatggttaggagaaatgatgatcatatttcaatcaaagagatgaagagttcctctgcatcttttgtcatgtttttttagataagatgtatacaactttacgcctacggcgt

SEQ ID NO: 5319 - DNA, 355 bp, Lilium asiatic
tgggccgggttcggaggcccagcaggaacccatggcttgattgcctcgaccgctacccggccccgctctgaagtgtcggctgagaaggaacgacgtgaacgagtattgataagggcgccacacaaattattataaaatactatatgtattttgaaataactttgcggcgccttttgcaatactcatacatggttagattctgatatggttactttcccttgctcaatgtgtgatttattaatagagtattctaagtcttgttgtttgttctaaaagtggaaacaatgggagtaaatgggtgtaagagtaaagtatgaagtcatttcttacatttttaattgaagaacatgttatt

SEQ ID NO: 5320 - DNA, 370 bp, Lilium asiatic
  modified_base (7)..(7): a, c, g, t, unknown, or other
gtcgaanccgggcgccacgcgtcgcagatctaggttttgggccttttcacataacagcatggccccgcgaggaaacgaaaaaaccgcggggaacatcaacaacaagcttgctctggtgatgaagagcggcaagttcacgctcggctacaagaccgtcctcaagtccctcaggagctccaaaggtaagttggtaattattgccaacaactgcccaccgctgcgcaagagtgagatcgagtactatgctatgctgtcgaaaattgtagtgcaccatttcaatgggaataatgttgatctgggaactgcttgcgggaagtactacagggtctgctgccttagtatcagtgatccaggtgattctgacatcatc

SEQ ID NO: 5321 - DNA, 367 bp, Lilium asiatic
caaagctactccatggaaagatcttggagaagggcctcaatggccaaaagctcattagggtcctcactaccaggagcaaagcacagctccgggcaacattcaatgactacaataatgcttttggaaatacaatcagcaaggatttgcacgctgatccgaaggacgagttcctctctgcactgagagcagtcataaaatgtctcctcttccccgagaagtatttcgagaaggttattcgtcttgcaatcaacaagatgggaactgacgagggtgcgcttactcgggttgtgacaacccgcacggaggtcgatatgaaagcgatcaaggatctttactttaaagaggaacaacgtgcctcttgaccatg

SEQ ID NO: 5322 - DNA, 430 bp, Lilium asiatic
cggggacggaatggcgggggcgacccacgcgtgcgatttatttcgagctacgcagtggagaccaagactctgttgtgcccctcacgggcacgcgatctcaggtgaccaaattagctcgtcatctgaaattgaagtcaagagacccatataggccatggtatgcaggtggacaggttagagatttgtacacttttcctattgtcgaatgaacttaccattacaacagacaatcataccatcaccatggggttgtagttaacaaattatcactagggttttggttagacatgttttttatgattatctgattctgatacatgttttttatgcaggttggagggtggtacgaagtttacgggaacgggaagctaatttatgcaacagttcggggagcatctcatatggtgccctatgcacagccagaacgtgc

SEQ ID NO: 5323 - DNA, 390 bp, Lilium asiatic
tcacgcgtccgatttgggacgggaacttagtgagagcaatgatgactctcagtgaagggaatgtaacatgcatggtattccatttcaatcattacatgaaggataaacacttgagtcatattttagaaaggattccccttgattgatagcctgtggctcgcaactcgtactcgtagcttgtagatcctcgacgatgacactggggtacttcatcaggctcctcgctaatgggatggggctatgcctcgggttctctatgccacttcttactggcacgagggtcaagattggtacgaaggtgtaggggtctacaacgtgtggtgcaacggtgggtagaggaggggactccaacggacgtgtgttgttggcggcagagcgataccaaatttg

SEQ ID NO: 5324 - DNA, 395 bp, Lilium asiatic
ctgaagaggagaagaaggctgctgaagaccgtgcagctgccgtgaagtcttctaccaagaagaaagagagtggcaagtcatctgtgtttctggatgtaaagccttgggatgatgaaacagacatgacaaaacttgaagaagcagttagaagcgttcatcttgagggtttgctttggggagcctctaagcttgttccagttggctatggaatcaagaaattgcaaattatgatgactattgtggatgaccttgtgtctgttgatactgtcattgaggagcgtctaactgtggaaccaataaatgagtatgtccagagctgtgacattgtcgccttcaacaaaatctagactttgctgagagggggaaatgctgtttgcagttgagtgggagacttt

SEQ ID NO: 5325 - DNA, 191 bp, Lilium asiatic
ggcagtgaaaaagaaagtcagcataggacaaggtaatgattttatgcagggatatgggaatgagcaactcgtaaccgaagaccaaatccttgattgggttgaccgtctatatctactagttcaacctgaagatgtgaggaagttcgaactttggccagataattccattgctcattatctaaaatactggg

SEQ ID NO: 5326 - DNA, 401 bp, Lilium asiatic
gcgaatccccccaaatctgcaactatggtctgcctggcgtgcctgctcccccgctggctcatcccgctggtcaacgccttgccgcttctcattgacttcatcataagtaaggtgtataggctatttggtcgggaatacagaaagccagaaagagtccctcctgcttgccccttcaagcctgcaaccagtaagaacgaccaagttggggttgatgatcagctaaatccacatttgcggaaagaagctgctgatgaattgaagcaagaatgagccaaaatctttagggtgtaagaatgccctctatgctctgtttattctctgtttattatggaacctgattgactcgaaacttttacagagcgaagattgtgttgtaaacattatcaataagcaaggatttt

SEQ ID NO: 5327 - DNA, 325 bp, Lilium asiatic
tcaatatgtggaccgaccccccgttctttatacacccgggcatctcaattgcgtgctccccaatttagagagcactggtagccgtcacgcagctccagccgatccagccgccaaatcgaactccccagctatcttcagaatgtctcgccgatacgatagccgaaccacgatcttttccccggaggggcgtctctaccaggtggagtacgcaatggaagcaattggtaacagctgggtcagcaattggcatccttgccaaggacggtgttatcctagtcggtgaaaagaaagttacctccaagctgctccagacctccaagtccac

SEQ ID NO: 5328 - DNA, 370 bp, Lilium asiatic
ttgggccgggggatagcccgtattccgggggagtgttcttcgtcatgatccattttccgccggattacccgtttaagccgccgaaggtcaattttcagacgaaggtttaccacccgaacatcaactctaacggtagcatctgcctcgacatcctcaaggaacaatggagccctgctctgaccatatcgaaggtgcttctctcgatctgctcccttctgacagaccccaacccagatgaccctctcgtccccgagattgctcacatttacaagaatcagaggtctcgctacgaggagacagcccgagcatggacccagaagtatgccatgggctgatgattcagagacgagtgagagtaacatgtattcta

SEQ ID NO: 5329 - DNA, 282 bp, Lilium asiatic
cagacatcactcttagagcgcgctagagctaactcccaggcccagcttgtgcgatactccgatgcatgtgagagtgaagatacgaaagctggaatgttccagaagggatatacctactaagcaggcgatcaaccgaggttaccattttccgttttgtttaatcgagatgttcggtatgtaatatgtaatcggaggtgtttcataatccgtatcggcgtggtatcaataaaagttctttttttgcttgttaagatggcgttttctaaataaaaaacattctct

SEQ ID NO: 5330 - DNA, 406 bp, Lilium asiatic
gagaactgtcatcgttatagcccataggctgtcaacaatacaagctgcagatagaattggtgttatggatagtggtaggattgccgagattgggagccacttggagcttattcaaaaggacggcctgtatgcccgattagctaagcgacaggcagatgcctttgcgtagtcatcgaattggtgattatcagcagattgcgaaggtctgttccatgtgttttaatgtggtggatcagcctagctatttgaggcttcgggtatctattcttcttctttactaacagaagcaactcttatagggttatggaaaaagaaattttttttcttttttaatatgtaaaatggtatcaccagctatttaacaccaatacggatacgatacaaaaaatctaaagagacaaaaact

SEQ ID NO: 5331 - DNA, 393 bp, Lilium asiatic
cctggatgagctttctactcttctccaggttcctctagttgctggtaccgggaacagaggaagggaaatcattgctggtggaatgactggcaatgactggaccgctttctgggggtcaaaccactcccgaactgaactctctggcattgagaagggtttcaaattgaaagaaacccagccgagttcgattgtcgaggagatgaggaagtcactcatcgacacatatgtctgatgagatgcattttcatattagatgcagtatgaagttctgctttgattcgtcgctgcagcactgttttggttttttatattttgacattgtcagatctgtgctgccgtgtttgctttgatggtatttgcgttatttaatggtaatctttagatttggactgc

SEQ ID NO: 5332 - DNA, 372 bp, Lilium asiatic
tgaagcatcccccaccccgacgctcactctcactcccacccaattttcttattgtgcgaccgttcggtatgtgcaccgaccccccgttctttatacacgcgggcatatctattgggctcgacgatgctgaaagagcagtggtcttcgctgacaagcctatgagagatctggccacgatgccattctttgggaaattggaggatgatattatatcggggccggtggtggccatggtgtgggaggggaagaatgttgtcttgactggaaagaacattattggcgctactaacccggcggagtcagatgcggagactattcggggggattttgttcttgagattggaaggaatgtcatttacgggcgtgactcaa

SEQ ID NO: 5333 - DNA, 396 bp, Lilium asiatic
atttgtttcactggcaggcgacaattatggggccgggggatagcccgtattccggcggagtgttcttcgtcatgatccattttccgccggattacccgtttaagccgccgaaggtcaattttcagacgaaggtttaccacccgaacatcaactctaacggtagcatctgcctcgacatcctcaaggaacaatggagccctgctctgaccatatcgaaggtgcttctctcgatctgctcccttctgacagaccccaacccagatgaccctctcgtccccgagattgctcacatttacaagaatcagaggtctcgctacgaggagacagcccgagcatggacccagaagtatgccatgggctgatgattcagagacgagtgagagtaacatgtattct

SEQ ID NO: 5334 - DNA, 389 bp, Lilium asiatic
gttctttttctcctctacatccatccggctatgatgcatcaatcatgtcttctctgaaggctcatcttgaatgtcaatttcagaagaaggatttgggggttctctggtactttcttggtctggagattgctcaaggaccttgtggtataccttttctcatcagaagtacaaatatgacattcttggcaatgctgctatttctgactctcagactttggacactcttcagcagaatgtgctactgatgtcgggtcgtttcctgattctaattgttatagacagttggtgggtcagcttgtgtatctttgcagtacttgtttcgacatttcacatgtcgttggtgtggtcagtttgtttgtctatgtgcctttttcagcccatcatgatac

SEQ ID NO: 5335 - DNA, 372 bp, Lilium asiatic
gaaaggagtcggggaaagtgctacatgcacatttcgccaatgatttctatttcttttttcaaaaaatttctctctgacggtcatttttcagcttttcgtcagaatatcgtaatataacctgaggtttcaaattgtattttcttgaaatctcgtatgacctgaaattgatagttcgatagtgaataatacaggtcaagagtttataacacttgataagtactcttagtccagtagatgacacgaggtcgaacccacaccttgatagtgaaataatatgtttctctttcttcgggaaaaagagtcaaccaatttacgcgtgtgatcgacgaatttacagaagatagaattttttttggaatttcctttttaagg

SEQ ID NO: 5336 - DNA, 385 bp, Lilium asiatic
  modified_base (95)..(95): a, c, g, t, unknown, or other
ccacgcgtgctgtagatatcacatcattgacgcttcggttggtgggacgaccgttcccggctctgtgagctgggatcttgtgaagaacaacaacncgttcctggtgaagcagttcgggaatggcaacgccaaggtgcagtttagcaaggagagcaacaatctctataacgttcactccttcaagcactccgggcttgcgaataagaagacggtttcgatccagcctggggggaaagatctgtctgttgttcttgctacaaccaaaactaagaagcagaacaagcctgcagcgctgtatcacaggtcggtcatgaagaaggagttcagcaagatggcaaaggctgtcaagaatcacgtagcggacaactactataggcctgatctg

SEQ ID NO: 5337 - DNA, 317 bp, Lilium asiatic
  modified_base (47)..(47): a, c, g, t, unknown, or other
aattgggagatggacagtatcacagatgttactttcggaaactgttntatataagaactgcttatgggactactgtgtctcatgtatatgatcttgttggaccgactggaatggtatatgctgtggagttttcacaataagaatggcagggggcggcgcgttttaaggtacaaagctaaccaacgctattattataattgaagattctattatatggtgcacaaaatcaaatgcttgggcctatggtgaaaacatctttactgaaaaactcaggcggatcaagctaagattttgggaaagaaatccccttttttcca

SEQ ID NO: 5338 - DNA, 379 bp, Lilium asiatic
gtgcagcggccttgagtgggctcaagaatgcctggggtggttttggtattctaaagccaggaaaaggaccatccgagccgaacttcaaaatacaaattaaagaagtggtagggcaactagatgtgatcgagcgagagagggctgaacagggcgtggtggtctctgctcaagttgatgagatccatagtctcacactagccagagaccgactggaagcggagctcagaagttctgaagaagcattccattcaatgaagcaggagttggaacagggacgtgcaaaggcgctagatgagctcaagtgtattcaagttgatttttatgttctagagaaagaaaaggaacagtccgaacaaagcttaaaatcagagatttaaga

SEQ ID NO: 5339 - DNA, 66 bp, Lilium asiatic
aaaaaaaaaaaaaaaaaaaaaaaaaatattttataaaacaaacaaaaataaaaaaaaggagggttt

SEQ ID NO: 5340 - DNA, 360 bp, Lilium asiatic
ggctttgctaacactcaatggtgttccgttgggggggtataatattaagctttcttggggtcgtactccaaataaacagccacagcaagatcctaatcagtggaatggtaactattatggctatggccagacgaatgaagcatatgcttatgcccaacctcctcaagatcctaatatgtatgcatatggagcttatcctggatatggaaactatcagcaacaacagtgatgtgtggctgaagctgcgatagcaagcattggtggtcggtttatgaggaatttagatggcttgctttctactgatgtagttggttgtggagacattttatatttttcagatttaagtttttcccgaggtgt

SEQ ID NO: 5341 - DNA, 193 bp, Lilium asiatic
  modified_base (58)..(58): a, c, g, t, unknown, or other
aaaaaattaaaaaatattaaaaataaaaaaaataaacaatacaataaaatcctccagntttttataatactttaaaaaataaaaaaaaaaaaagggccgccccctttaaaagatccaactttccttccccttccttccaacgttttaattttttttttggggcccctaatttcatttccctgccccccttttt

SEQ ID NO: 5342 - DNA, 375 bp, Lilium asiatic
cccacgcgtccgatggctcaagacagtgaagcaagtgggctataatggatgaagaggcaaggacaaagtaggggatagcagtaggcacgagggacaatgatggatagaagacagagactccatggcatagctcaggggagacagtgaaggcagctcaagggcacactgatagtaaagggcaggcagctcgagttttagaggaaggcaaggttaacttcagatggagaaagattccaagtcaagcagtaaggcgtgcaagtctctctagtagtaagcatcttttggcttctctggatatctcaaaatactgacaatggctctagatcaagagtgggtagacagtaaagattatagaagcagagacatggctgatac

SEQ ID NO: 5343 - DNA, 392 bp, Lilium asiatic
cgaagacggaactaagattgagtacagggtgtggaaccctttccgctctaagctggcatctgctattcttggcggtgtcgacaatatctggattgctcctgggactagagttctctatctaggagctgcttctgggactactgtgtctcatgtatctgatcttgttggaccgactggaatggtatatgctgtggagttttcacataggagtggcagggatcttgtgaatatggctaaaaagcgaaccaatgttattcctattattgaagatgccaggcatcctgcaaaataccggatgcttgttggtatggtggatgtcatcttttctgatgttgctcagccggatcaggctcggattttggcattgaacgcctcttatttcttgaagaatg

SEQ ID NO: 5344 - DNA, 182 bp, Lilium asiatic
cccacgcgtccgatttatgcaaaaaagtaagaagttttataaaaatgattagacgtgcccaaaatataacttatgtctaagcatgaaataaaaaagatatttttattatattttaatattcaaatatttctctataacttatattgcttttatcaagaacctgaaataaaggaagctagttt

SEQ ID NO: 5345 - DNA, 405 bp, Lilium asiatic
  modified_base (358)..(358): a, c, g, t, unknown, or other
gtcgcacctggtcccattgtgcatgccaagtgctccttaagttcagttgatgagatggatgttgcggagcccaatagaatggggtggacaggcagctgatacctgaaaagagaaaaaacatgattcttttactgcaggttggagcatttgaggtcaatgaattgggaagaggtttgatcggatcatgtgcttgctagaggggctgatttgcttgtgaatgatatatgatgcaatctcccttttgatgaatccatatgttttccaatcaccacataattttgaaagaaatagataagaaataggttgcctatttatcctttagtctaatgcgattagtgatgtttgctttttttcattntagtttccttgatgaagtggattgtggttataattcgagcatccgat

SEQ ID NO: 5346 - DNA, 376 bp, Lilium asiatic
gttcatttatcatcggagggtagcaatatcgtggtggatgaaatattaaaggtggggaaggaagctaagtgggagccatgtttgtactggaagtcgctgccggctgaatttggtgatgattcaccttatgacctcgtgttatcggacggattatcgactgccaatatatctgaggccacttttcatagggagcagtggaactagaattgctggctacaaggtattagatatcgctttcgtctctttcttcttcaagtaatgaagtgtctatcttagttagaatttgagtttgaatgttttagatgcccagtattgtaataataaacattggaaacgtgaccatctagtaataggagatgctcctgttttctttgtc

SEQ ID NO: 5347 - DNA, 308 bp, Lilium asiatic
ccacgcgtccgcttccgtacatgaccatgccaagcacatagcttgcttgcaataatctcatctatgaacgagtagctctattgcttcataataagttcgttgaacatcatgtgtgctcaagattcgggccaaccgtgaagcttgcaatagccccaccaatgctttgtcaggtgttttgggaagcaatccgccgacatgaaggaagatcaacccaaaatcaaggccatcctctaaggatccctcaatttaagccgatccaatccatcaccacgatgtcgatccaagttactgcaaaagatctttatatg

SEQ ID NO: 5348 - DNA, 424 bp, Lilium asiatic
tgactatgaagatgagcagctaagagaagagccgccccagaaggtgttgattgatcgagttcagaggaatatcttggctgataagccccgtgtgacaaagttcccgatcaacttccatcctgaaatctgtgataatggagcagaacaagcccaggacactttgtttgaggagcagtcgactgaagagattcctgctgagcagtcgactggagagattcctgctgagcagtcgactggagagattcctgctgagcagtcgcttcctccgtcagagcagtcatttcctccatccgaacagtcactttctccacctgagcagacccctaatcgtacttgagtggcagttatcgtcgaccttgcttactgctaatggattgaaaatgagaacagtgttgcattggatgttttacatttccgttttatg

SEQ ID NO: 5349 - DNA, 316 bp, Lilium asiatic
cccacgcgtccgcccacgcgtccgcggacgcgtggggaaattgttgttgacattggatcccagttatcttcagctcccaaaggaaaaattgcagggaagaatgtacaaaatgttggaagctctgatgtggatgaacttgaaaagcggttggcggctcttagaaacccgtgagcaaaagctcactcgatctcccgatttcacttccgaattgcttcatgtgttttaatgggtacataaagttgtgtttgagacattgacgtaattagcgagaaccagagcatgggtgacatcacaagattattactaattatatact

SEQ ID NO: 5350 - DNA, 375 bp, Lilium asiatic
cggacgcgtgggagctttgggactttccccttattcaataacatgctctaatatcgtggaaaacaaaaagtacttggggactatggcacaataaaagtgattaatatcaaataaaaaaggtatataatatgaaataaaatactttataagtaaggaatcaaagatgttatactttgatacatcatctaagaagatatatataaaatttattaataaagtgcacacgagatcctatgttatgcatattgcatccagattgctagccattttgataaaaaaatttcaaggatattattgtcccacagtgatctccaattagaaatataatatttggacttatcttcaatactaaatttatactctcctgataaatgt

SEQ ID NO: 5351 - DNA, 388 bp, Lilium asiatic
attgaatccagagcaaaaaaatgtgttgcgaatgcgactgccggccgctggggtggctgctgggcctccccttcgccttcctcgccctcatcgtctccatcgtcggcgttattatctggatcgtcggattgttgctgtcgtgcatctgcccgagttgtttatgtgtgacgatcgtggtggagctggcgatcgagctcatcaaggcgccgatacacgtcatggagtggttcaccaaacagattccgtgctagagctagtaattccctttcttctcttcttcaattttagggtttgtgtttatgttttcttagctatgtaattgactgtgtgttctagattaaagatggattcataatatttggaggataaatataatttgggtcgccgg

SEQ ID NO: 5352 - DNA, 403 bp, Lilium asiatic
cttattctccgaaataagttgaagtatgctcttacctaccgtgaagttgaatcaattctcatgcagcgacatgtcatggttgatggtaaagtccggaccgacaagacctaccctgccggcttcatggatgtcgtctctattccgaagacaaatgagaactaccgcctcctctttgacaccaagggtcgcttccgtctccactctataaaggatgaggagggaaagtttaagttgtgcaaggtgaggtctgtgcagtttgggcagaaaggcattccttacctgaacacctatgatggcaggaccattcgctacccagatcctctcatcaaagccaacgataccatcaagcttgatttggaaactaacaagattattgactttattcaaattgatgtggggaatg

SEQ ID NO: 5353 - DNA, 408 bp, Lilium asiatic
caacggtggatcgaccagcaagcgtcaccgtcgccctcacgtttgccctgcatctgcaacgacttgtttatccccgatcgatccagccctagccttcatccgtcggcgagcgagaagcaggagaggcgatcgccatgacgctcggcggctccgctggatccagcatcgtcgttccccggaacttcagattgttggaagaactcgaacgaggagagaagggcattggagatggaactgtcagctacgggatggacgatggagatgacatctatatgcgctcctggactggcaccataattggtcctcataattctgttcacgagggtcgcatctatcagctaaagttgttctgtgacaaagactaccccgagaagccaccagtgttcgattcactcacgcataacatga

SEQ ID NO: 5354 - DNA, 389 bp, Lilium asiatic
  modified_base (357)..(357): a, c, g, t, unknown, or other
  modified_base (372)..(372): a, c, g, t, unknown, or other
gtttctccgaccgcggaagctcagacaaagttatgaagccacgaattttcgaaaacgtgcgatcccaccacgtatctcaaatcagcactggactgtaccacactgtcgcggttaccaaccggggtgtggtattcggctttggcgacaacgagagggcacaacttggtcacgactcgttgagaggatgcctaaaacctacagaaataatggttgaaagagcaacaaatgatatgagcattgcagctcaaagtagctgatcactgaagatgagtagttgatgaagggaaccgagcatcgaaaatacgtatttgaccgaggatgtgcatttctgtatttctttgtatcatgtttagattntgaggtgattgtagntatgttatacttatatc

SEQ ID NO: 5355 - DNA, 399 bp, Lilium asiatic
atcttggttcaacagggcagttaccctttcccctgacactggagatttttgggctgtcttctacaagtttgaacttcagcatggaagtgaagagagccaaaaagatgttttgaaaagatgtgttgctgcagagccgaagcatggagaaaaatggcaagtgatttcgaaggccgtcgagaattcccacttaccagttgaagccattcttaagaaaaccgtggttgctatgggtaaagaagagacgtctattctttccgatggcaccaaatctcaggctccatcccactgaagtagagattacataggagtggttgctgcatgatgcgtaaaggttttcttcatatagggcgcttctgtgctaatgatgtacattcagatgcaatggtgcacatcatgaac

SEQ ID NO: 5356 - DNA, 191 bp, Lilium asiatic
ctgacgcgtggtgttctagtcacgatcgttctttattttttctttcgtacgattggagagagatcttaatcaattccgattctttatttttatatcgattcttttccaatccagatctattgaaacattgacctatcccaacacaaacatctatcgactaacaaaaattttgacagctctctttatagcta

SEQ ID NO: 5357 - DNA, 426 bp, Lilium asiatic
cccacgcgtccggcaaaaagcagctcatcagttgagaagaattacgagctgcctgatggccaggtcatcaccattggagctgagcgcttcagatgcccggaggtcctgttccagccctcgctcattggaatggaagctgctggcatccatgagaccacctataattcaatcatgaagtgtgatgtcgatatcaggaaggatttatatgggaacattgtgcttagtggtggatcgacgatgttcccgggcattgctgaccgtatgagcaaggagatcactgcactggctcctagcagcatgaagattaaggtggttgccccaccggagaggaagtacagtgtctggattggagggtcaatcttggcttccttgagcaccttccaacagatgtggatatcgaaggcggagttcgatgaatctggtcca

SEQ ID NO: 5358 - DNA, 318 bp, Lilium asiatic
ctcacttgtaaatggggtcgtttattttgcacttggtcgcaatagtgtgggtattgggaaaggtaaaaggatcttggaaaacatgatacttgcttttaccttatattatgattagaggcttataaatatgtatgaatttgagaaacctaattgatctgtaccatcttcttgcaagtaatctattcactctttgccaaaataaaaaaaaacatagatgctatcagaaaaaaaaaaaatgcctattttttacgattgcaacaaatatgatgcttctttcccctgtaagtgatgcttcatatgagttggtgctatctaata

SEQ ID NO: 5359 - DNA, 264 bp, Lilium asiatic
  modified_base (175)..(175): a, c, g, t, unknown, or other
ataaatcatatatgtgtgtgcgttttggtgatacctaaacttatactttcttaaacattactgactcaaacacttattacttttctacatatcgttgaacgcttgagcgtctgctgtatatctttgatacaacatttgggttggataccccaactacgtagaaaattgataattnagatttttttctaatagaagaataagttacatgattatattttattatacaatagtgaaataaaatactattatatatctatttttgct

SEQ ID NO: 5360 - DNA, 140 bp, Lilium asiatic
ttttcgtgcacttgcggatcttgagtaattcatgggcgagtgcggatgcctggtcaattcattgacatttggaattgcttgcaggatgcataaatctgagaacaaattggtgagttgtaaacttggcgatattaaatgtg

SEQ ID NO: 5361 - DNA, 399 bp, Lilium asiatic
  modified_base (6)..(7): a, c, g, t, unknown, or other
cggaannccggggcggccacgcgtccggtcgcccatactaacagtgacctcgtcgactgtgtacccgtcatcttcactccagcgaagactgacgacgagtgttgtccagtacttgagtgatgtaagcattaaattccatgcccccaccatctgttctctatcgacagtctggcagcttgccaaggccgacaacaatactgggaagcgctatgtgaccatcgagggagttcccggcaaagagaatacttggttcaagatccagaaatctggcaagtatgcatacaagctggtgtactgcccaagtgacgagaatacgtgcagcgatttaggcatttactacgacaaggatgccgggaagaggtggctcgctttgagcgactcaccattggaggttatgtt

SEQ ID NO: 5362 - DNA, 154 bp, Lilium asiatic
gtcctccctggcgagctcgccaagcacgccgtctctgagggcaccaaggcggtcacgaagttgaccagcgcttaggcttaggcttaggctttggttgtgttctgttcggttttgtaatttttagctgctatcaatatgtttcgatttctgatcg

SEQ ID NO: 5363 - DNA, 372 bp, Lilium asiatic
gcctgaggcaagagagatccagcgtgtgatctgagctcggtcgcccgaagatgagggcggggtggaagaagaagaggatgaggaggctgaagaggaagcgccgaaagatgaggcagcgatctaagtacatcctgatgcagtggccttcatcaagtggaagatagttgattggtctttcatcttgctgttggtttctctgttaatgtctggccttaacatgcttaggcatctaaatttcctgttttgcagctctagtatgtcctaagacttcaaatgttatgctttttgttgactatgtgtgagacaatggcgctgaaccatatttgatctcttttgagatgtttaatgttgaaaggtatttattcctagaat

SEQ ID NO: 5364 - DNA, 388 bp, Lilium asiatic
gctacgccaacaattccaactacaagtaacgacacaatgatccgtaaggaggtcttggtcacccccgccggcctccgcgagtgtcgccgcatcatcgccgactccgagattatgaaggaggacgacactaactggccggagccggaccgggtcgggaggcaggagctggagattgtgatggggaacgagcatatctcgtttacgacttcgaagatcggctcactggtggatgtgcagagtagccgggaccctgaggggcttcggatcttctactacctcgtacaggacttgaagtgcttcgtgttctctcttatttccctccacttcaagattaagcccatccaggcctaacctttggacttctttcatctgttggataatcatttta

SEQ ID NO: 5365 - DNA, 143 bp, Lilium asiatic
agggtttggggggggggagtttttatcattaaggaattaaattgtagcaagtcttttggggtcgtcgggtggtatttctttattataaaatgttttatacaacacaaacacactaatcacaatgtcaaaaaccatattttcct

SEQ ID NO: 5366 - DNA, 182 bp, Lilium asiatic
cccacgcgtccgcggacgcgtgggttggaactgtcttggccatcatacaactattggtgtatgccaactatagcaagaaatcaagggaagagtctacgcttccactgctaaggtgatactgccatagggaaaggtgtatggcttcattttattgaacggaattcttccattggctttttttg

SEQ ID NO: 5367 - DNA, 410 bp, Lilium asiatic
ccacgcgtccggctgaaacttgtgtggcaccagtctgatgctatcatgtgctgttctctgaaggctgcacctgtgttcaccttcgctaatcaagctggtcttgacatgctggagacgacctttgttgcgctgcaagagattactcttgagaagatactggatgatgctggtcgcaagatgctctgtgcggagttccccaagatcatgcagcagggtttcgcctatcttcctgcggggatctgcatgtcgagcatggggaggccggcatcctacgatcaggctgtcgcatggaaagtgctgaatgatgaagacatgcctcactgtctggctttcatgtttgtcaactggtcctttgtgtgatggttctgttgtgttatgctagtatgactcttatgagtgatgttatgtat

SEQ ID NO: 5368 - DNA, 372 bp, Lilium asiatic
cacgcgtgcacagcgtccgcatgaaacacatggtatcacctccacccccaattgacgtgtgagtttgcgaatagagctcacaacgagaaaaacggtgagattttgtgaagaaatttgcaagcttttttgcggacgatatgtgcagaagacggattgttgtggacgatatatgtagaaaatggattgtatgggcaataactgttggtgaacaaaatgatcaacaattataatacgattgattcactcatgaaatactgaatttctggaaatctgtatcgcactattgttatcacagaaaagataacaagaacgtgccaaaaatgcccaatatctttagtcatcaataacattattcggacccggacttaagac

SEQ ID NO: 5369 - DNA, 406 bp, Lilium asiatic
caagcccagcatcagccccaccctcctcctatctaacatgtaccagcgcgccgacgtgatcacccccggcgtcgacgctctgggccagcccatggatcctcgtaagatccaggagcatttcgatgatttctatgaggatttatttcgagagctaagcaagtatggcgaaattgagagcctcaacatttgtgacaatttggctgatcacatggtgggtaatgtgtatgttcagtttagggaggaagagcacgcggccacagcacttagcaatctgactggaagattttatgcaggtcgaacgatcattgttgatttctctacggttacagatttccgtgaggcaacatgccgacaatatgaagaaaacacttgcaatcgaggtggctattgcaaatttatgcatttg

SEQ ID NO: 5370 - DNA, 418 bp, Lilium asiatic
aggagagggattttcttgttttcgtcaacatccagccagcagagctggaggagatggcgctgttgatggtgggctgtacatatagggatcctgtgtcgaaggagatggttaccatggcaggtgaggaggtgagagttcaaaggcaggaggttgtggtggctcagacgatgtcagtcgaggtggatcgggagaaaacacgagtcctggctgtagaggccatggtggaagcaagggctactgcagagcggggagatctttctcaggcggtgttggtacttgaggagcggcggaggacattgtcagagtccatagctggaagggctggtgaccggttggctgtgattctggaggcagagctaaaggagatgcatgataggatggccagtctgcagaggtatgagtcgtcaggacgggctta

SEQ ID NO: 5371 - DNA, 342 bp, Lilium asiatic
gtggtgcaagagggcgagctccagctttcggtgcttacgtgcgcctgggattgcttgtgcttgtctcagagcccttgagaactgctgtattaaatttttaaggttttattatttataccagatattacttcaaattagaagggtattagatggttctggttcttatctagaaagagagaggcatcggagaaacacattgttgaaggggatgaaggcgctgcaaatgtaaaattatactcttacaatgaactgaaaagtgccacgggaggttttagccctgataataaagtgggcgaaggaggatttggctctgtctacaagggaaaacttaaggatgggaca

SEQ ID NO: 5372 - DNA, 382 bp, Lilium asiatic
agtctctcaacatgcaaagtatttctttgagttctgcggaaagtattccgtcaagcgaaaggctgttggaatctggggatgtaaggactgtggcaaagtgaaggctgggggtgcttataccctgaacactgccagtgcggtcactgtgaggagcacaattcgtcgtctgagagaacagactgaaagttgatcatagcattttggcccgaggttttccgaatttgttgctatttatgcttttatcttagactcttttccggacccgaactctttggtagacttttgaaatgtctgcttttcttatgactttatgttctctgttttgtctcatgactataatgacacctaataggtctctaatattgcaatctttactgaatgc

SEQ ID NO: 5373 - DNA, 367 bp, Lilium asiatic
tgcatatccaatccaaaggtgaatgtgatggacacactgagcaggctaagccatgattctgatagtgatgtatcaatggcagcaattatttccttgggattcattggcgccggcacaaacaatgctcgaattgccgctatgctccggaacctttctagctactactacaaagaagctggacatctcttctgtgttaggattgctcaaggtcttgttcacatggggaagggcttgcaaactctttctccatatcactctgatcgttttctgttgtctccgacggctcttgctgggttagtggtggtcttgcatgcatgcctcgacttgaaggcgataattttgggaaagtatcattatatgctttata

SEQ ID NO: 5374 - DNA, 332 bp, Lilium asiatic
cccacgcgtccgtccacgcgtccgattgagtttctgctagagaatggtgacagatgggaggctgagatagcagaaaatctccgatctgagagcctctatcgctgatttttctggttttgaagtgctagctggggtcccttattttcctgcaactttcatgtaataaagcacattttagtctatatctgtcagaattgtatcatgcagttctgtatttgatatgagcaaaccgctgatcctatgtgcgcggtttcttagaagtgaactttgtttgataaatgtcaaatgtgattttggtacaaatcactagaactaaaatgagttctattcag

SEQ ID NO: 5375 - DNA, 300 bp, Lilium asiatic
tcccgaatcgacccacgcatccaagcgttcgggttaatctgtggccagtacgaaagcttttttgcattgttacactggcgagggcatgggacgagatggagttcactgccgctgtaagcatcatttacgagctggtttttgagaatgagacttccatgatgctacagctgatgaggaggcggacttttggatcaacaggcaccactagtaattctgaacttggtactgatggttggtagtatctcttatgctataaacaccaggtgctagttaacactagctctgtatgggaagcttttc

SEQ ID NO: 5376 - DNA, 276 bp, Lilium asiatic
gaggcgcgcacgaaaacaagctgaactccatggcgaacaccgaggagaaggaggcggagaaacgggtaaggaaacatctaaaccttcaacttactctgttatgaactccggtcggtaatacatctgctgcgacagcctttttcttggctgctcctttgaattttccgtttaaaagaattagtctaataacgatgaactttacacagaacgaactacataccgaactttaattattgtggaaaatgtagcaaaatctgttccgatatcgtttcagat

SEQ ID NO: 5377 - DNA, 360 bp, Lilium asiatic
gagaaattcatctccaacccctccgctgcgatgacgaccgttcccggctctctgatctgggagcttgtgaagaacaacaacgcgttcctggtgaagcagttcgggaatggcaacgccaaggtgcagtttagcaaggagagcaacaatctctataacgttcactccttcaagcactccgggcttgcgaataagaagacggtttcgatccagcctggggggaaggatctgtctgttgttcttgctacaaccaaaactaataagcagaacaagcctgcagcgctgtatcacaggtcggtcatgaagaaagagttcagcaagatggcaaaggctgtcaagaatcaagtagcggacaactactat

SEQ ID NO: 5378 - DNA, 362 bp, Lilium asiatic
gacagttttgggttatcggtggcgtattcgcccatctctttgcagtattccaaggacgagtcaaggttctcgcaggcgttgacaccaatttcacggttacatcgaaggcaggagatgaagacggtgacttcactgagctatacatgttcaagtggacaacactttttataccaccgaccacactttttattgtcaacttggtgggcatgggtgctgggatctcttataccatcaacagcgggtaccagacatggggggctctgtgttcgggaagctcttcttctcattttgggtggtggtgcatctttaccccttcctcaagggtttgatggggcggcagaaccgaacaccaactattgtcg

SEQ ID NO: 5379 - DNA, 349 bp, Lilium asiatic
cacgcgtccggtaaaattaattctcatttttatcgttagcatcacgacctaccctctcggtatcagccaatttcttatgggcaacatctacacaatcctgttgaagcacttaaagaattaacacatcaaaatgcatagcttctagcatagcatcattttatataaccttaacttctctaacaaaatgagcccaacacatcctataaacatatttattcactctatgcagaaaaatccattctatattcttgctctccccaagcttaaaaaaaacaccaaaaactcatcactttaatctcgtttaatcaaaattactcttttttatcattataacgtagttctttcaaaa

SEQ ID NO: 5380 - DNA, 346 bp, Lilium asiatic
gggcgggccacgcgtccgcggtctcgtgggtttcgagctcgcattgattttgtcgagctggggtgagaagagcgcgggcctcaagagcctctggatctggacgttcggaacggctgcaatcctcatcgccagtgtcgccaggacgagattgcaggacatggagaagatatcgaaggaggaagacacctgccgatccgagcccgtcgtccgggctaatttcgtcgagactgttctcagcgacaagtgagatgctttcgaagagtgccttggaattactcaaggtttatcgccgacttttaatatccaggtattcataatataagtgtcatcggagtgctttaaattt

SEQ ID NO: 5381 - DNA, 340 bp, Lilium asiatic
ggaaaaaagataacatttaagggtttatttttcaccaacattccaaaccaaggttatccagttgattacatttagaaagccagaatcaattcaacaacttaagccttcctgggggacttaatagctttttttggagacttcgggttcccccctttttttccaatctttttcggcaacaagaccgggttgatgttttgcggaacttcaccttgagcaaaagtaacaccccccaacagcctcccaagctccttattattttttacagccaaacacacattttggggaacaattccggtttttttgttttcccttggcgcattttccgccaacttaaaaacct

SEQ ID NO: 5382 - DNA, 80 bp, Lilium asiatic
gaagatgcagcccgaaatccaggtcattccataaggcgtacacagatcgatcgtggcgttgtatctttgtgtttggtggg

SEQ ID NO: 5383 - DNA, 91 bp, Lilium asiatic
cccacgcgtccgctttcatttagttctctgtaatatttccatatgtctgtaattcgactgttatatcaatataattgtgtgtttgtgcatt

SEQ ID NO: 5384 - DNA, 341 bp, Lilium asiatic
gttcgaagcaaagcagcgatgtcgggtcgaggcaagggcgggaaggggctgggcaagggcggtgccaagcgccaccgcacggtcctccggaacaacattcagggcattaccaagccggcgatccggcgcctcgctcgccgaggcggtgtgaagaggatcagtgggctcatctacgaggagacccgcggggtgctcaagatctttcttgagaatgtcatccgcgatgctgtcacctacaccgagcacgcccgccgcaagacggtgacggcgatggatgttgtgtacgcactcaagcgccaggggcgaactctgcacggcttcggcggctgatgggtttggtc

SEQ ID NO: 5385 - DNA, 379 bp, Lilium asiatic
tcgacactccgaaatccgacggcgggctctttgtcgacatgaattcggggctcgcattcgggaaggagtatgtgggatggaactacgagaagagcgggaatccggtgtatctgcggattcagcagaggcggaagccggctgaggacgccgaggaccggccggcgaagaagcctacgcttctggccatcggtgtggaaggaggatttgataatcaagaacctgaatatgcagagactcacgacattgtaatactaccagactatatttctcttccatttccgtcggttgagttgccggagaaggtgaggctggcagttgataagattttactggctgagggtgctgagcggagagagcaattagctgcctggacagccgt

SEQ ID NO: 5386 - DNA, 204 bp, Lilium asiatic
taagggccttatgtccgagtgtctgctatgtgtatcagtacgaggaggatgatgaaataagggctttttaagtccgagtgtttgctatgtgtatcagtgcgtggggtgtcttgaaataagagctttatgtccatctgtctttttttttaatgtgaatcactgtatgtggagatgaaaaataatatttaagagtagtttaatctc

SEQ ID NO: 5387 - DNA, 286 bp, Lilium asiatic
cccacgcgtccgcaccatcttgtttgccagggatgtacatttctgcagggcagttggctttctcccttgcagcaggtatgaaacgtctatagcactggccttcgtcacgtggctgttaattgccatttcatccattgccatgttttggatccttgcctcagggtgactacttcacatgtatatgtttgtttttaaaattctgttatactcagattggaacagtaccatttatgatataaacattgaaccttttacttttcaatgcaatgcacttacatttgtattc

SEQ ID NO: 5388 - DNA, 310 bp, Lilium asiatic
acggaccagcagcaaatcaagtgcccaccataaaattttcagaagtggaaggcttcttggtcctaaataagtgcacggatgagctgatagctttccaatgggtgtcataacaaaggtcgtggccctatagaaagtgacattatgaaattcttccacaggtaagttcaattgagactaaatgtcacctttattgccttaactccgaaggaaagagatgcttcatgggtgggaaactacagacccatcaatctactgaacagctttgataaaatacttacacacattttggcgaacagatttaagggaaact

SEQ ID NO: 5389 - DNA, 83 bp, Lilium asiatic
gatccatcagccaaagaaagatcttgctgtacctggctttgcttttctctgcttaatggagaccggtgctgcctgacttcctg

SEQ ID NO: 5390 - DNA, 255 bp, Lilium asiatic
cgagactaactcaagttgccccttgtatgacagcacgtggacgtccaaagacggtagtcagtagccggtgatggaaggtatatgtaatgtccaacactcaaatcaaagagtcggcaaatacatataaacttaataaattattgtactgatttaacaagctttgtagataatgtctcagccataactatcccagatacagattggtcatgttcctataatagctgaatataaacagcaaaattatgattgatactg

SEQ ID NO: 5391 - DNA, 398 bp, Lilium asiatic
gaaaacaggcgggagccacgcgtccgcccacgcgtccgctgacgcgtgggtgttgctggatcccctccccgttcgctccccgggggggccgccggggtgcgaggcccctccatgcttcccctcccgcgactccacctgcgccctagacgacgacgaggatctctacgggcggctcaagtggctccagcgccacatccaattcatcgatattcaagaggagtatgtgaaggacgagcagaagaatcttaagcgtgagctcctccgcgcgcaggaggaggtgaagcggatacagtcagtgccgctggtcatcgggcagtttatggagatggtggatcagaacaatgggatcgccggatccacgacgggttcgaattactatgttaagattcttaacacac

SEQ ID NO: 5392 - DNA, 322 bp, Lilium asiatic
gaaaaactcccggtggctaaaaagcttagttaactcacggacactaaaaggcctgggagggtgccggtgatgcctgtccagttcaccattcaaagcggcacaaaatcagaagaagctgcacgtaccggccatatggggatgatgcctagtaagccagaaaaacttctggtgacgccagcccattgcgctgaccaaggagatggataatcagatggacgggttttacctacagacgatgaggggacaatgggtagtaagcctgaaaaactttcagtgacaccagtccagggcgatggaaaatcatatggacacgttttacatg

SEQ ID NO: 5393 - DNA, 328 bp, Lilium asiatic
gcgcaaagaaccaagttggaatgtaacgtacgacagtttgttaggaaccaacaaaccttgtccgcaggatatccccctttgagaaatggtaaatttccttgtggatgtctgggagcaggaggggatgtatgattaggccagcattatcttttatgtattacttttacctaaagcctctttctaccaagttagactcctttgtaaatgtgcttccagcagctcaaggcatttgtattttacaagtcacagctggggcccccttggcaggagctgtaatgtgtttgttccgagtatgagatggaaactcttttgcataggagtgccaaaa

SEQ ID NO: 5394 - DNA, 323 bp, Lilium asiatic
gcggtttgtgacagattgtttcatatttaagattgaaatcaactccttgcctgcacaatgatgtcgggagtaattataggccggactggtcgccataggcagcgctacgatgaccattttcgactcgttgcagggtgtattccctataggagaaaagaaaacttggagagttgtagtggggatctcataaatagcttcgaggtccttatgatctcctcaccaagtcgagacgatctcgttttccccaagggaggatgggaaaatgatgagactgtttttcaagcagcatgccgcgaagctttggaggaggcgggcatcagagg

SEQ ID NO: 5395 - DNA, 332 bp, Lilium asiatic
cccacgcgtccgaacagcccagaaacgtttggacacgtgggaggacaagaagaaggctctactggccgagcaagagtgaccataaaaaaatgtacatcaatgtcgaggcaacacgcctgacatgacttcatcgtctgagcctcactggaggctgagccgtccggagccgtggcaggtccttgccggatgtcagagtggagaaggcacctcaattacttttgatttagtttcgtttcgtcttatttggaatgctgtagttgatgcattcatctacagctcagtttacgtataaaagttttgtgaacttcacgtgttagtctgagtattatttc

SEQ ID NO: 5396 - DNA, 299 bp, Lilium asiatic
aaccccttgaccggtgacaagggagagatcaggctgcagtgcaacgtggctaacaggaggcactagatagggttggtgctgagaggagtgtgtgtggtggccctcctatggatggggacggtgctgtggatgttgttgctgccgcttttcctttgtttttgtttcggtgttatcggtgcctagctaggattgtgggtgatgaagatgtattatctatgaaaggaggatgttgtaggtggtgtttttctctaagtggaaagatccatggatgtgtatgggatattatggttatttggttt

SEQ ID NO: 5397 - DNA, 397 bp, Lilium asiatic
  modified_base (6)..(6): a, c, g, t, unknown, or other
  modified_base (26)..(26): a, c, g, t, unknown, or other
  modified_base (35)..(36): a, c, g, t, unknown, or other
  modified_base (60)..(60): a, c, g, t, unknown, or other
  modified_base (82)..(82): a, c, g, t, unknown, or other
  modified_base (96)..(96): a, c, g, t, unknown, or other
  modified_base (102)..(102): a, c, g, t, unknown, or other
  modified_base (106)..(106): a, c, g, t, unknown, or other
  modified_base (133)..(133): a, c, g, t, unknown, or other
  modified_base (139)..(139): a, c, g, t, unknown, or other
  modified_base (143)..(143): a, c, g, t, unknown, or other
  modified_base (145)..(145): a, c, g, t, unknown, or other
  modified_base (171)..(171): a, c, g, t, unknown, or other
  modified_base (188)..(188): a, c, g, t, unknown, or other
  modified_base (204)..(205): a, c, g, t, unknown, or other
  modified_base (210)..(210): a, c, g, t, unknown, or other
  modified_base (224)..(224): a, c, g, t, unknown, or other
cggaanggccggggcggcccacgcgnccgggaccnngcaccaacgccgaccctgggagcnacacaccccaaaagctggggangaggaagggcaccnagtgcngccnccaaaccacgggacagggcaagccggngaggcncagnancaacggcacgccagaagaaaagcaangggagggggctgggganacaaagaggacccacnnatcgnccaaactagccganggcactgccgactgcttggacgtcgagcaagacggaacaatcgtcgctaacccatgcagtaggcaggacagtgctgaaggtgaggagcttgacagccagtggtttgctatggttacaggccctccaaacgttgttgctgcaaatagtgggggttcttctgctggctttggaac

SEQ ID NO: 5398 - DNA, 324 bp, Lilium asiatic
gcaacatgcgacgctcatcggaacgtgttggtccttcatcctactctggaggagatgattcactatgacgggtgggctcgagacttcgcagctaatttaaaactatcttctggcttgagtccagttcctgtatgagttcttacttcatcaagttcactgcgatggagttctggaactcgagacttcgcattttcgcataaatcagtagctgcgtacatttccccccgtgtttggtgtagcaatgactatcagggtaatgtatcttttatagttttatatagcaatcccaaaactatcgcaattggcatgtttcagtcttcattt

SEQ ID NO: 5399 - DNA, 302 bp, Lilium asiatic
  modified_base (296)..(296): a, c, g, t, unknown, or other
cggacgcgtgggcggacgcgtgggcggacgcgtgggtttgtgtagcctgaacttgtcatctagtttagctcttttcatctttataaaaaaaagcaaaaaaaaaaaatatgttctctagttcattcctaactcatctagcatcttagatagcttcatgtcataagctttatagctttccttcatcccatagtttagtttagtccttgcataaaagaatatataaattatattttacttgtcattcatctagcttagaggttgtatatatctagctggcttttttaaaaaaaaaaatntcttta

SEQ ID NO: 5400 - DNA, 324 bp, Lilium asiatic
cccacgcgtccgcttcattctccactattttttccaccttccaacaactccacaacggccgttaccctccgacaccggcagaagcttcatcaaggtatatctatctactctcttgtcccctttatgtcttatttggattgttatgtgtaggattttggaaaagcttggatttgcgtggcaaaatgaggaaaggatcaaagctcaagaaggaaaagagatattgcaagcttgatgaggatgtgctctcggatctataagtacccctccttccccattggaatgaggtaagaagtctcactccggccccagtgggggagggcacat

SEQ ID NO: 5401 - DNA, 367 bp, Lilium asiatic
cgtggatcttacaaaattcaacaactatgatgaattgacagctgagttagacaagaggtggggttttgagggtgaactgatgtctccgaacaaaaattggatggttgtatacactgataatgagggcgatatgatgctagtcggagatgatgatccatggcaagaattctgcagcgtggttcgcaagattttcatctacaccaaagaggaggttcagaagatggatcagggtacccttgactccagagctgaagagacgactgttgcagaagagagaaatctgatagaactgaaggggcaatctacgacaacgactgctgattaagacaactgatgggggggctactgctgcactttaagatgtttt

SEQ ID NO: 5402 - DNA, 345 bp, Lilium asiatic
cacgcgtccgattatatattacactctcgatctaattttattaactgacaccctactttgtctaggtggggtgctcacagagtgagcttatcacaacctaacataaattagatgctagaaaacattgataataacttctatatatacctttgtcaataatatatataaatttctagaattattaatgccttttcaccatatctttataaacaccaaaagaagacgttcaacatatatatcatcagtccccctacatcaatacttaaaacaccactcccgctttttacacaaatctcatgctaattatagagcaatctactaaaacgactgctcccttttacaact

SEQ ID NO: 5403 - DNA, 268 bp, Lilium asiatic
ggagggaggggggtgatctcctccctcctacccgtcacctcccagcggcggcgggggcgacaaaagcgacggcgagccagccgcgtactcggcgctgcgaagtctctgtacaagatgtggagctgatgaggcgagaatggatctatttggagctaattgactcatagatacttctcatatggcagaaaacatgaataataatctagcggttctgctatggcaagtcctgctgaagacgagcgtttgtgttatcggttaccatatttgg

SEQ ID NO: 5404 - DNA, 326 bp, Lilium asiatic
gaaatcaacgaggctttcgatctgttgcacgaaggtggctgcctccgatgtgtccgcgaggtgcacacagagtgatataatcacaagcttatgttttgagtagcgagaaatgattgctgctatcttttatgtctccatttctcaatgctgtagagaaatgttggaactatcaatgcctcggcaccctgcctggttgaggactaggggagttttcagacttttatatattttgttgtcataaataaatacttgcatcgggttgtgtgctttttgttcaaatttttggcttatactatataaacttgcttaatgtgttgcaccgggtt

SEQ ID NO: 5405 - DNA, 401 bp, Lilium asiatic
gtttgaggcggagttgaaggcggtgctgccgaaggaggtagaggcggcgagagcggcagtggagagtgggagtccggcaatcgggaataggattgaggaatgcaggtcgtacccgctgtataagtttgtgagggaggaactggtggccggatttttgagcggagagaaggtgagatcgccgggggaggagttcgataaggtattcaatgcgatttgtaagggaagagttatcgatccgatgcttgagtgcttgaaggagtggaatggtgctcctctttccatcagctaaactactccacccataatttacctaacttttaacgggaccaaaaaccttctttttttgattggcggtatatctatttggtaattaaaaattataatttggtaatggattttaa

SEQ ID NO: 5406 - DNA, 137 bp, Lilium asiatic
gttgtatctctcaattgcctgctcatgttagtagaattgtgcgttctaccatattcgtataatttggatgcttcagacgagtcatatatagtttgtgttcgactagttatttgtaatttgtattcgactgtccctaa

SEQ ID NO: 5407 - DNA, 76 bp, Lilium asiatic
gggggtccggggcacgacgcgacgcgtaacggaacgagaaaaaaagaaagagaaaaaagaaatttaggaataatat

SEQ ID NO: 5408 - DNA, 374 bp, Lilium asiatic
  modified_base (116)..(116): a, c, g, t, unknown, or other
  modified_base (221)..(223): a, c, g, t, unknown, or other
ggccgaccccgcgtccgaaaaaaaaaaaaaaaaataaaaaaaaaatatatttttttaaaaaaaaaaaaaaaaaaaaagaaaaaatttaaatgaatatgggagaaaaaaaaataaanccttatataataaaaaataaaataatataaatattttattacttattctttttttggggggggcgttttaaaaaattgggttttttttttacatttccccccccnnnaatcttctttttttgtttactttttttttttttatttttcccacttttttatttacccccccctcttataaccctcccccacccccccccttttttgcttccccaaaaataccctttttttcactttttttttttttttaaaatttcgttt

SEQ ID NO: 5409 - DNA, 267 bp, Lilium asiatic
  modified_base (13)..(19): a, c, g, t, unknown, or other
  modified_base (22)..(25): a, c, g, t, unknown, or other
  modified_base (27)..(28): a, c, g, t, unknown, or other
  modified_base (40)..(59): a, c, g, t, unknown, or other
cggacgcgtgggnnnnnnnttnnnntnntttttttttttnnnnnnnnnnnnnnnnnnnngggggggcacaaatattttagaaaatacatgtgatctacaaaactttcgatctgatcgaaggacaatatatgtataaatcgtcctgaccgtaatggagaccgatatgggggggcgcgtaatcaaaatgttggtggccgtggtgcccctgtgggtgaccgctataacaactatagccgggaacgttctggtccatatgaccgggttgca

SEQ ID NO: 5410 - DNA, 354 bp, Lilium asiatic
cccacgcgtccgcggacgcgtgggttcgatggagtcagtgtggacacaaaatcagcatcatgaggattcacaagatgaggaagaagaagatgatcctgatgatgctgattttgagccagacttcgatggagtcagtgtggacacaaaaaagaaggctcagatgtcagagagtgatgattttgatgaagatgatgactttgacccgtcagatgatgatatggcttttattgataaccggcggaggaaatcgcgtcagcctgtccgccgcagttcgaaacctaccagagagaataaatccacttcgactattcggcgaaaaagaggaaggagttcttctgaagaggaagaatcatc

SEQ ID NO: 5411 - DNA, 403 bp, Lilium asiatic
ggcggcgacgagatggacgcggcgaaggcgaaggagctgaagctgtttgtggagcagtgccggaagaaccccgccatactgagcgacccctccatctccttcttcagagactacctcgagagcatgggcgccaagctgccccccgccgcctatgggtccggggagtcaccacgtggcggcgttgaggaagtggtggatgaaagcgatgagaatgtttccgatgaggatttcagtgatgtacgtgtcaagccaacagagcatgaatctgatgaggaaattattgaatctgacattgagcttgaaggagagactgtaaaacctgacaatgaacctcctcaaaaaagggccgacccttctgtggaggtaactgaaaaaagccgggatctttttaaaatggccaagg

SEQ ID NO: 5412 - DNA, 447 bp, Lilium asiatic
ggaatagtatggaatataactgggggaaatgatttaactttgtatgaggtgaatgctgctgcagaagtgatctatgaccttgtcgatccggctgcaaacttaatatttggagcagtgattgatccatcaattagtggtcaagttagcataactctgattgctacgggattcaagcgccaggatgaaactgaaggccagaagtcacaaggaacacaactaggtcttggtggtaaccttggaataaaccgacgaccatcctcttctatgactatgggtggtattgtggagatccctgattttctaagaaagaaagctggttcgcgcaacccaagagcttaacaggttcacaatcttgtaggctttattccaattatttgaggtccttttgcagagatatcaggtgttttcattccttgaatagcgtaagctgttatgccatgagcaata

SEQ ID NO: 5413 - DNA, 477 bp, Lilium asiatic
  modified_base (67)..(67): a, c, g, t, unknown, or other
aaaaaaccggggcgccgacgcgtccggttgtgtcaagcccccgatcatctatgttgttgtgagtcgncccaaggccatgacgggctgctggtcctgcatggcgcagagcatgacctcacgcccgatgaagggaatgttgaccggtccggtcacaatcctcaattggtcttttgtcaggaatgaccaaccaagattcgagacatgctatcaaattgcccttgccatcaagaaagaggttgaacatcttgaagctgctggtattcaggttatccaaattgatgaagcggctctcatggaaagactgccacttctcaaatctgagcattctttctacttggactcggctgtccactcattcagaatcaccaactgtggcgtgaaggacaccacccacatccatacccatatgtgttacagcaacttcaatgacattcatccattccatcattgacatggatgctgatgtgatcactattg

SEQ ID NO: 5414 - DNA, 439 bp, Lilium asiatic
  modified_base (402)..(402): a, c, g, t, unknown, or other
cggacgcgtgggaagagggcgatggacgagtacacctcggagatctttatgggaggtaagagcactattgtactgcacaacacctgcgaggactcgctccttgcagcgccaatcatactggacttggtgctgctggcggagctcagcagtaggattcagctcaaagctgaaggggaggaaaagttccattccttccatccagtggctacaattctcagttacctgaccaaggcccctcttgttcccccgggtactccagtggtgaatgcattgtcgaagcagagggcgatgctagagaacatcatgagggcttgcatcggattggcgccggagaacaacatgatcttagagtacaagtgagatgagttctaaccgagttgggagcggttggggaaagtttangaaaggaaagggcaaggcttatcttttttttcttcag

SEQ ID NO: 5415 - DNA, 455 bp, Lilium asiatic
cccacgcgtccgactagttctagatctactgttcttttcagtaaagctaattgattccatgcggagggaaaaaaaaaaaaggggaaaaaaaaaaaaaaaaaaaaaaaaaaaaaaaaaaaaaaaaaaaaaaaaaaaaaaaaaaaaaaaaaaaaaaaaaaaaaaaaaaaaaaaaaaaaaaaaaaaaaaaaaaaaaaaaaaaaaaggggggggggggataaaaaggaaaaaaggtaaaaggagggggggaggaaaaaaaaaaatttttaaaagggggggccaaaataaaaaaagggggggggggtaaaaaaagggggggaggggaaaaaccgggggggaacaaaaaaaaaaaggcgtggaaaaaaaaccccttttaaaaagggggggaaaaaaaaaaaaggccggaaaaaaaggcctttcaaaaaaaggggcaaccctaaagggaaaagggaaacccc

SEQ ID NO: 5416 - DNA, 441 bp, Lilium asiatic
cccacgcgtccgccgagatcccaccctcctctcccggcggctccgatttccaaccctcatcagatacaatgaaggtcattgctgcctacctcctggctttacttggtggaaactctagcccgtcaagcaaggatatcaagcatattcttggttcagttggtgctgatgctgaagatgagcggattgagtttttgcttgctgaagttaaaggcaaggatataactgagttgattgcttctggaagagagaaatttgcatctgttccatctggtggtggtggtgtggctgttgcagtgtcggcaggtggtggtggtgcagctgcccctgcagcagcagctgctgagccgaagaaggaagagaaggtggaggagaaggaagaatctgatgatgatatgggatttagcttcgttgattaagtgctgcgcttttgatgggctagat

SEQ ID NO: 5417 - DNA, 440 bp, Lilium asiatic
gatctcaagaggcgatcctggcccataagtctcgcacatgcaattgacaaaaaagcgaaagcgggctatgctacccgcttgtcgaaagggtggaaggaattctgtttagataaccagctggagataggagattgttgtgtctttgagattgaagcaagtgtgaaggacactatgcatgttcaggttctcaagtcttgaatggcgagtctgggattaaattacagagtgatcgcggttaaagcaacattatacaatgattaatatcggggtaatcttggaccattcttcgatttcagtttgctctttctttccttggtatcatgtgatatgcatgtttattttagtgtagttgctttttatgttgaggagagtgtatgtatgttagtgaaacatcaaattttcattgcacgtctcattttaattttaaaagatatttaagc

SEQ ID NO: 5418 - DNA, 379 bp, Lilium asiatic
cccacgcgtccggttgttcttactgcttgatctgattgcatctggtttgtgatttgattattcagttttgcttgttttgctgtcttcctaaaatagtttgtcggaatatttggttatggatatctattttgtgttgaatgatacatcttattgaactccaaaaaaaaaaaaaaaaaaaaaaaaaaaaaaaaaaaaaaaaaaaaaaaaaaaaaaaaaaaaaaaaaaaaaaaaaaaaaaaaaaaaaaaaaaaaaaaaaaaaaaaaataaaaaaataaaaaaaaaaaaaaaaaaaaaaaaaaaaaaaaaaaaaaaaaaaagggggggccttttaaaaaaacccattttttaaccccggtctggggaaagttttttttttttt

SEQ ID NO: 5419 - DNA, 215 bp, Lilium asiatic
cccacgccttcggttgttcttactgctggattcgatttcatctcctttgtgattttattagtcaggtgtacttgcgacgcggcctgcctaaaatagatcttcttaatatttggttatggatatctattttgtgttgaatgatacatcttattgaactccatatttttattttttataggaaaaaaaaaaacaaactcttactttttctgtttctt

SEQ ID NO: 5420 - DNA, 339 bp, Lilium asiatic
caccacatctctctctctctctctctctgaaagatgaagattctctccatcaccttggctctgcttctgctcctcctaacttcctcctacctcgaatcagccatggctggtccgcctgtccccgcagggttctgtgataataagtgcggcgttcggtgctccaaggccgggaagcagtcacgttgtctcaggtactgtatgatgtgctgcaatgattgtggctgcgtgccgtcggggacttacgggaacaaggacgagtgcccgtgctacagggacattgtctggggtcccctcaggaagccaaagtgcccatgattatgcgagctatgggtgttctat

SEQ ID NO: 5421 - DNA, 421 bp, Lilium asiatic
gaaccaccctggccagattggtaatggttatgctcctgtcctggattgccatacctctcacattgctgtcaagtttgctgagatcctgaccaagatcgacaggcgctctggtaaggaaatcgagaaggagcccaagtttttgaagaatggtgatgctggatttgtgaagatgattccgaccaagcctatggtggtggagactttctctgagtatcctccgcttgggcgttttgctgttagggacatgcgccagactgttgctgttggggttattaagagtgttgagaagaaggatcccactggtgccaaggtgaccaaggctgctatcaagaagaagtgaggtgttcttcaatttatgtctgagtttcttaagatctgcaagagtctagttggtaatgcttggttttgtttatcgaacttt

SEQ ID NO: 5422 - DNA, 446 bp, Lilium asiatic
gttgctatgggtaaattcatggaagctgttgtagtagcagatgaaaacacaggaaaggaatgcattaagtatttgaaggaacaacgccttcctcctcagactttcatccctctgcaaacagttcgggttaaaccaatagttgaaaagatgcggactttgggagggactgcacagctggtcttcgatgttattcagtttgatcgatccttggagaaggccgtcttatttgctgttggaaatacactagtatgtgatacccttgaagaagctaaagtccttagctggggcagggagaggcacaaagtggttactgttgatggaatactcctgacgaaatctggtacaatgacgggtggaataagtggcggaatggaagctagatccaataagtgggatgacagtaccatacaagctctgaagaaaaagaaacaacaatgggaatcaga

SEQ ID NO: 5423 - DNA, 452 bp, Lilium asiatic
catcccttcgcatattcaattctttccgatggcccgcacgaagcaaactgcccgcaagtccaccggcggcaaggctcccaggaagcagctggcgaccaaggccgcccgcaaatccgccccggccaccggcggtgtgaagaagccccaccgcttccggccagggactgttgccctgcgcgagatccgcaagtaccagaagagcacggagctgctcatccgcaagctgcccttccagcgcctggtgagggagattgctcaggacttcaagaccgacctccgtttccagagctcggcagtgtcagcgctgcaggaggcggcagaggcatacctggttggtttgttcgaagacaccaacctttgtgctattcatgctaagagggttacaatcatgcccaaggatatccagctcgctcgacgcatccgtggagaacgagcctgattggtagtgtttc

SEQ ID NO: 5424 - DNA, 422 bp, Lilium asiatic
atccggcatgatcttctacaggaagggcccgaagccggccaagaaaggccagcctgaaggcgctgtgtacgactacgaagacaagataaacttcgccgtgttcccatcccttcagggtggccctcacaaccaccagatcgctgcacttgctgttgccctgaagcaagcaatgtcacctggattcaaagcctatgccaagcaagtgaaggccaacgctgttgccgttggagaatatttgaagagcaaggggtacaagatcgttactgatggcaccgagaaccaccttgtcttgtgggatctcagaccccttggcctaactggcaacaaggtcgagaagctctgtgatctggccaacatcacagtgaacaagaatgctgtgtttggtgatagtagtgcattggcttcccgtggtgttcgtattg

SEQ ID NO: 5425 - DNA, 444 bp, Lilium asiatic
gtgctgtgagagctgggatactgacacctttactcgaaatgctcaaagatccatccagcaatggcatggtcgatgaagctctgaccattttatcggttcttgtgagccagcaagagggtaaggtggctatagcgaaggctaacacaatcccgcttcttattgatcttttaaggaccgcacagccccgcaccaaggagaatgcaatagcgatattattggcactatgcaaaaagaatgatgccaatctctcttgcattgggaggcttggcgcccttattcccctaactgaggtggcaaagattggtactgagagagcgaagcggaaggctaattctcttctggactatctcaacaagttgcagatgctctaagcggatattttcagttcgactccattcattgaatttgtcgagctacgcaagacactgtgagtttgtattactt

SEQ ID NO: 5426 - DNA, 458 bp, Lilium asiatic
gtctacgtcgtgcaccagggcgagaccgcgcgcgaacaggcgttcatcgcggcggagcgcctgcgcgacacgggtctcgacgtgatcttccattgcagcgccgacggcgcgacggcaagcttcaagtcgcagatgaagcgggccgacgcgagcggcgcggcgttcgcggtgatcttcggcgaagaggaagtcgcgaacggcacggtgggcgtgaaagcattgcgcggtgcgggcgaagacagggaaaagaacgttcagcagaccgtaccggtcgaaagcttgaccgaattcctaatcaatgcgatggttgcatccgccgaagacggcgacgactgatcgcgctggcattcgctcgacaagaaaggcctgaacaggaaggaatcgctcgccgatgagttatcacgacgaacaagaatcgattgaaagtctcaaggcgtggtgggcccgctggggcaacc

SEQ ID NO: 5427 - DNA, 426 bp, Lilium asiatic
ctgtctgtctaattattaataattaaatttaatatacttataatttaaattaatttaattaaaaaaagtaaagggccatttgaatataagggcctaactcaaagtcaattcatttattttattttaatttaaaaaaaattacataagggcacattttttttcttcgcactgggtctcgaatccctcagggccggccctgtgttaatttcgaatctttaatttattaaacatgggtaaaaatgtcattttagttgcccatgcaaacggaaatgttttgacagaagttaattggacgcgggcgctttcagaatgataaagcccatttattactgcagtgctagctttccgaattgttaggttctctctcagaagcagtccgctggcctgacttaggatacgagtaatgagtttggagcagcaaacgat

SEQ ID NO: 5428 - DNA, 375 bp, Lilium asiatic
cggacgcgtgggcatttgagttgtttaaatttaaaaaaaaaaaaaaaaaaaaaaagaaagggaaaaaaaaggtaggacgttataaaaaaatacaaacttacatacacatacatacaaaaatatagggtcggccatttttaaaggatccaatttttcttccgcctgcttgcaaccaattactttttttttgggagcccttaatttaatttacttggccgcctttttacaccttcgtgtttggaaaaaccttgtctttaccaaatttattccccttgtagcccttccccttttttccacttgctgtattaccaaagaggcccgccctgttccccttttttaacatttgcgcatcttgattgtacattggaacccccc

SEQ ID NO: 5429 - DNA, 449 bp, Lilium asiatic
ggaaaatctcaacttttttcttaatagcttcttcaactctcctagatgtttcttcttctatcagtttcaactccgcttccttctgatacctgctaggacaagtaagaaattaaagagggaaatgtccttttacaaggatatcgcatcattgttacagaacaagtctcgagacctgaaagagagccattactgactccgaagcagcaaaacatgtctcgtctatcatgacacaagttttcattttttttcatcttaatactaaatataagctcatatggcatacctctctaacagattgcacatccaaataaacgagtattcaaactggtgaacagtagataaacgaggcaccaatgatcatcaaatataacaagtggaactatagcagtagcttccttcagaaaagcctgtggagaagaatgtcaagtaacttgtagcaattttaaaac

SEQ ID NO: 5430 - DNA, 455 bp, Lilium asiatic
cccacgcgttcgcccacgcgttcggcagtgtatagcattagaagagcaatcatgtgataaggaagctggagaagcggcaacaaggtcgtgttctccaatccaacattgaggatcagtttggtggtggcaggttgctagcttgcatttcttctcgccctggtcagtgtggcagatgtgatgggtacattcttgaaggcaaggagtgggatttctacaacaggaaaatccagaagaagaagggcaaggctggtgctgctgcttaggcagttgatcttgaacattttgttcttgcattgatcttgaactaattatgttttaaatctagcaagttgaaattccaaatggacatcaaaattttgatttggttcgaattatagctttttttttggtatcaaaaacaaaaaaaaaaaaaaaactatctcaataataaatttttattattttttttttttttt

SEQ ID NO: 5431 - DNA, 268 bp, Lilium asiatic
cttaaaaatattgttcggaataatgcagactttgtttctgtacaaggtcgtaccagtgttcattgagggtgtgatgtcgttgctgtttttctatatttttatgttgctttttcagcccatattttactgctatgtaacattgtggtgtcgtaccattgcctatgaagtatgagttgctggttaccataagtcaaagcactctttgtaatgcatgttcagtttatgaggaatatcaatttgaattggtctttacggccaacaatatctc

SEQ ID NO: 5432 - DNA, 268 bp, Lilium asiatic; identical to SEQ ID NO: 5431

SEQ ID NO: 5433 - DNA, 418 bp, Lilium asiatic
  modified_base (367)..(367): a, c, g, t, unknown, or other
tgagaatcagaaagaagagcggcgtcgaccaggtgttcgatcaaatgcttcagcagatcgaggatcagcccgttaagttttagctcccggagatcatggtgaagctgttgtttacactgtattgctcgaattgatggtacactgtatagctcgaattgatggtaaagtgaggtttgaggagttgtttttctggtatggggaaagaagaagcttcgtgacactgctgaagctgtccatgctgctggagagctccttgtgcgctgaggaagctgtttcagttacagaggagccagtgagaaaaacgacaattgattcctgcatacgtgttacagatgatgggagggaaaacatccatcgaaatgtgttntatatatttacactttacaatgcttccaatcacaatgatcaactcacgttt

SEQ ID NO: 5434 - DNA, 73 bp, Lilium asiatic
cggacgcgtgggaaaaaaaaaaaatttaaattaaaaaaaaaaaaaaaaaaaaaaagggatggggactttttaa

SEQ ID NO: 5435 - DNA, 241 bp, Lilium asiatic
  modified_base (199)..(202): a, c, g, t, unknown, or other
cccacgcgtccggggaagtgttgcaagaactgttcttcctttttctgttgtaatttgtaaaacttattggtgtgtaacttgtgagtttgtttcttagtgtttatgtgagttgggcgtggcatgcaaatgtaatcatgtttacagatttgttccgactatcatttccaactttaatgaatatgttttatcagtggtctannnnaaaaaaaaaaaaaaaaaaaaaaaaaaaaaaaaaaaaaaa

SEQ ID NO: 5436 - DNA, 87 bp, Lilium asiatic
gagaaaaccacctcatggaagagttcggttcaaattgcagtattcgtattttggtaggatgtgttaaaagaaatggcagcttagatt

SEQ ID NO: 5437 - DNA, 311 bp, Lilium asiatic
ataccaaacctctgggcgattcacgcaaagagggtgactatcatgccgaaagacatccagctggccaggaggatccgtggtgagagggcttgattatggcttactttgtttagggtatcctgttcttgcttctcaattagctgagaagatgtatgggtcgattttcatgtttagggtttctagttcttattcgctacttgcgaagatgttggattttaaggttgtcttggttttcttcagctggctttgatgtttcagtttttgcgaattattgattttttttttatcaatattttattcactcattaagc

SEQ ID NO: 5438 - DNA, 342 bp, Lilium asiatic
cagcaacaagagcaacaacatatgctgcactagaaagggtaattatctgttactgcacagtggtgactttcgtgcaaaacaacatcaaattcgtgtgcaaaaatatgttttctgtttcttcaatactaaacgggggatttacttttttccacttgataaatgtgttcgatattgttgatgacagttgatatcaataaataatattcacacgattatattttccaaaaaaaaaaaaaaaaaaaaaaaaaaaaaaaaaaaaaaaaaaaaaaaaaaaaaaaaaaaaaaaaaaaaaaaaaaaaaaaaaaaaaaaaaaaaaaagggggcggccgttttaaaggatcc

SEQ ID NO: 5439 - DNA, 444 bp, Lilium asiatic
gagaaatgaaacggcaatcgatccaaatcgccggcgagttcccgcaagaggcggcaaagaagcagcggctggaggcgccgccggatctgggggatgacctggtgtttgaggtgctgaaacgggcggatgaccggacgctggggcgggcggcgtgcgtgagccgccggtggcgggagatggcggaggacgagcggctgtgggaggcggtgtgcacgccgcactgggcgagcatgggctgcggcaagctgcagctccgatctgtggtgcttgcgctcggcggcttccgccgcctccactcgctgtacatggtgccgctccggccgtcgtccagcggcgctacgcagcgcctcccactgccgttcggcagcggcggctctgccaatttacggaggccgagccggtggggtaaggacgaggtgcaactgtcactctcgctgctatcga

SEQ ID NO: 5440 - DNA, 402 bp, Lilium asiatic
gcgtccacgcgtgcggtctcacccaaagcttgtatcatgtctgggcggggtaaaggcgggaaggggctcggcaagggcggcgccaagcgccaccgcaaggtgctgagggacaacatccagggcatcaccaagccggcgatcaggcggctggcacggcgtggcggcgtgaagaggatcagcgggctcatttatgaagagaccagaggagtgctgaagatatttttggagaatgtgatccgtgatgctgtcacctacacagagcacgcacgtcggaagacagtgacggctatggatgttgtgtatgctctcaagcgacagggccggactctgtacgggttcggaggctgatcttcttctctggtatcctagtcttggaagtgctgttattgttagctgtgaatg

SEQ ID NO: 5441 - DNA, 364 bp, Lilium asiatic
gaagattgatgcccggaaccagcttgagacgtatgtctacaacatgaagaacaccattggtgagaaggacaagcttgctgacaagattgagagtgaggagaaagagaagatcgaagaggctataaaggaagccctcgaatggcttgatgacaaccaaactgctgaaaaagaggactatgatgagaagcttaaagaagtggaggctgtctgcaaccccattatctctgcagtttatcagaagtccggtggttctcctgatggtgcttcggacggggggtgacgatgacgatgactctcatgatgagctctagacgtttaaaaaaaaactattttgcttctcccctcgattactctatgatagtgc

SEQ ID NO: 5442 - DNA, 455 bp, Lilium asiatic
ctcaaagggattacgtcccggcttgatgaagtagttgtcaatggaagcatggatcaccggtacccggggaatttgaacatatcgtttgcgtatgttgagggggagagtttgctgatggggctgaaggaggtggccgtgtcgagcgggagtgcgtgcaccagtgccagcctcgagccgtcttacgtactacgtgcactcggggttgatgaggatatggcgcatacttctattaggtttggtattgggaggtttacgacggaggcggagattgatcgggcgatcgagcttactgtgaggcaggttgagaagctgagggagatgagccctttgtatgagcttgttaaggaaggggtcgacatcaagacgattcagtggtcacagcactgaatgtgtgagttaaagagtagcggttggagaggagaagctgcttatggtaggtgtgtatcattctactc

SEQ ID NO: 5443 - DNA, 460 bp, Lilium asiatic
ggaggctacatgccaaatcgccctacactgatgaagaaactcatcccacaggaagacgagccagagtacgagaacttcctgtcaaatcctcagtacacgtttctgtcttcggtgccatcacaactccaagctactcagattatggcagttcaggatacgttatcgacgcactctcccgatgaggagtacttgggtcaggcatatgaggcacgttctcactggatcaatgatccgcatgtgttcagatcatttgagaagttctcagggaagctacaagagatagaggagatcataatgaagcgaaacaaaaactcgcttctcaagaacaggagcggagcgggggttcctccgtatgagcttcttcttccatcttcaggcccgggagtgactggccggggagtgccaaatagcatatctatatgatgtaacattatcatgttattggtgcttggtttcgcga

SEQ ID NO: 5444 - DNA, 416 bp, Lilium asiatic
gctgagaagggggagaagaagaagaaaaaaaagaaggccgagctagatgagaatgctattgctgaagctgatggagaattctctgagaaacccaagaaaaagaaaaagaaaactggagcagaaacagaagctatagagcaagaaacaggagtcgaagatgaaggaacgaagaaagaaaagaaaaagaagagaaagcaggctgagggagatgttctgatggctgacgttgaggaacaaccagccgagacttcagccaagaaggtaaagaaggacaagaagaagaagaaggaagatgcatgatctgtttgtgctggtagctgagtaatatggaagatggatgatctgtttgtgtcagtaggcaaagtaaaggggttcttacaattttcgtaagtctgtatttttcaagacatgataag

SEQ ID NO: 5445 - DNA, 460 bp, Lilium asiatic
  modified_base (450)..(450): a, c, g, t, unknown, or other
cggacccctgggccagcggagaacccgagaggggcttggtcgacgtgatcgctttcgatggcgggcaagttcgctttcaccgacggcgatgggaatgtgattggggaaaaaactgcaaaagggttcaaccctggtttggtcggtctgctcgtggttgtaggaatagtgctgcttttcctggtaggaaactacgccctctacatatacgcacaaaagaccctccctccgaggaagaagaaacccctttcgaagaagaagctgaagaaggaaaagatgaagcagggtgtctctgcacctggggagtaagattatgcttgtctactgtcttctaagtctagcttttggcgtcgtgtttgttgagcactaaagttacatttgaacattgacatgtttgaacagtattattagatctttcatttgtgggtcctcgtgtctctcatttgttaagtntggatggata

SEQ ID NO: 5446 - DNA, 374 bp, Lilium asiatic
cccacgcgttcgcggacgcgtgggcaaactatggtgagcacagccggtatcccagatgtcgcagcagcgccacagctgcagcctggtgaggtgaagcaggccagagcatcctaatctctgtgaggtatggtgctgattctatttcatgtttcatattctaactgagggatattaatacttgcttacctggttaatagacactctttatgtattggtgtaatctgttttgttgcggtaagacttctgaggccctgagggctattttcccttccctgggggaggaaatttgtgtgttttttaagctattaacttgatacattgtgtgagtgatcttaatattgcatggacccaggctagttggctgtaattgttgg

SEQ ID NO: 5447 - DNA, 204 bp, Lilium asiatic
  modified_base (22)..(22): a, c, g, t, unknown, or other
  modified_base (34)..(34): a, c, g, t, unknown, or other
cccacgcgttcgcccacgcgtncgcccacgcgtncgttcgtctcatagaaatttggaccaactatgactttagaagtttaaaagtactcaaaacaagtagtgatagttttaatttggtcacatgccacaaatataaaatatttgtaactttattggttatttgatcatattaaaaccttacaaagatataaagatgtatcattt

SEQ ID NO: 5448 - DNA, 433 bp, Lilium asiatic
gaaaatgcagctgctctggcatcgaggaagtcatctcctagggtgaacaatgaagaagtgcagaaagatgcaactgctttgaagggatctgaccaccgtcgggctacggatgtgagtgctagactggatgcacagcaaaagaagctaaaccttccgattcttcctaccaccaccattggttcgttccctcagacagtggaactccgaagagtccgaagggagtacaaggctaagaagatctccgaagaggagtatgtcagtgccatcaaagaagaaatcagcaaagttgtcaagctccaagaagaacttgacattgatgtccttgtgcatggagaacctgagaggaacgacatggtcgagtactttggggagcaactctcgggatttgtgttcaccgtcaatggctgggttcaatcttatggatcacgctgcg

SEQ ID NO: 5449 - DNA, 361 bp, Lilium asiatic
cccacgcgtccgcggacgcgtgggcagcggtctcatctatgaggagacccgcggggtgctgaagatcttcttggagaacgtcatccgtgacgccgtcacctacaccgagcacgcccgccggaagacggtcaccgccatggacgtcgtctacgcactgaagcgccagggacgcaccctctatggcttcggcggctaatctatctagggtttccgcggatgaactagacattaaatcggtctcctcttatcttaagagtgttaagtttgtgatgtgaatcttcgttttttgttttcttctaaacatggagctgtattagatccttgtgagattatgagctgttttgctatttcttaccggttc

SEQ ID NO: 5450 - DNA, 382 bp, Lilium asiatic
cacgcgtccggcatgacccagcagcaacgctccgccaacgcgctgggtggcagggccacccgcacctgcgacagctgcgtccgtcgccgcccccgttggtttggggccgccaccatggccttcttttgccaggcttggaattcaacggtcaattcggcaatttccttggccggcggaacggtcggcggaagttaatctagacgtcttctggcctgattacacgtcaataattggcgatgtgagtcacatggcagttacgacagtggacgagggacgggaggcgagagtgatgaggtatcgggagaagcggcgtacgcgactattttcaaagaaaataaggtatgaggtgcggaagcttaatgcagagaagcggcctcgcatg

SEQ ID NO: 5451 - DNA, 381 bp, Lilium asiatic
  modified_base (341)..(341): a, c, g, t, unknown, or other
ctttaattcaaattttactgatcttttgtttcctattgtaggatccgagcatgccaaagcgctcgtgtgaagatcctgaggggctataaatggagccaagcagagagaagagggacacgctggaggctcggaatgaagtaatgggttgagttccagctagggttgaagggttatctatacctccgattgagatggaacctttgagttcgatctttctcggagtgtattggataatccgagagagatagttagtgattcaatatagagtgcatgtaatattgtgagcttgagagatttatatgttttcatcattgatgtactttgatctctgctgtcatggntgtaagctttccttaagcctttctttactggctgtaatat

SEQ ID NO: 5452 - DNA, 405 bp, Lilium asiatic
  modified_base (293)..(293): a, c, g, t, unknown, or other
tctcgttccagtgtgagagcatggcttctgtggagaggaagctgacggagatgaagatcacgtacatccagcggcgagtcgaggagggaggcgtgtacgttgatcagctgttctttcatgacccagatggattcatgatcgagatatgcaactgcgacaacctgcctgtgatcccgctcaccgtcggcgagcacttagttgcttgtaagcggatgaagcagaagtactgtcaaccggcggcagcggcgattcacgtgaaggagagtaatatgacgccggtactggaagcgtangagcaatggtggagggccggcgattgctgactgggactccaggtgtatgttgatgtattttgggtgggttggttttgtgtagttcttgtatgaataagaggtacttcgtctt

SEQ ID NO: 5453 - DNA, 435 bp, Lilium asiatic
cgtctatttcccattccagatgtacatttcgaggaagaatatcgccaggtccagtcccaggtggatattgatgcagaccataagcgtactttcattcatcgtcacactcatatctgcggttggctctattgaaggggtggtcgaatcgctacagcattatacaccattcaagtcgaaatcttaaaaagatcatgaacgatggcatgattttcacccaaagtggaggcaattcagtattgagccaatcacaacgttgtctttgaccaaacacctttgcatcttcgtgttgtggtgcatggaattttcgtagttccttttgaataggataataagaacaattgatagattgatagctacgtatcctgtgtgagccaccaatagataaattttctttgtggtatgatttgtgatttttggcccccgtatattttgtgt

SEQ ID NO: 5454 - DNA, 293 bp, Lilium asiatic
aacaaaatgtagcctccaaaaagaggaagcatgaagacttggaaacaacacaacccacggcctacgcagatggagatgattctgtgcaagtaggaaatgctgagaagggtgagaagaagaagaaaaaaaagaaggccgagctagatgagaatgctattgctgaagctgatggagaattctctgagaaacccaagaaaaagaaaaagaaaactggagcagaaacagaagctatagagcaagaaacaggagtcgaagatgaaggaacgaagaaagaaaagaaaaagaagagaaag

SEQ ID NO: 5455 - DNA, 185 bp, Lilium asiatic
cggacgcgtgggattttgtaacacagaagttggtgaaccacattcaaagagaatacttaaaccctgaaatataggtggaaatgaaaaattcatacaaagaataaatttattttaatatatttcttgttctagactaattgagactatatctaaggatattactcttgaatttattagtattttgg

SEQ ID NO: 5456 - DNA, 494 bp, Lilium asiatic
  modified_base (137)..(137): a, c, g, t, unknown, or other
  modified_base (153)..(153): a, c, g, t, unknown, or other
  modified_base (165)..(166): a, c, g, t, unknown, or other
  modified_base (419)..(419): a, c, g, t, unknown, or other
gccgcttcgttttctgagggattcgatttttggggagggttcccatactgggcctaccctgcatcattatgatcacgtcttcgcagttcgttgcattaatacgtttgtattctggaattcctgaaacccttgcatantgcataagggaaagcnaatggtaggaannatggaaccacttgaagccttggagaccttcttaatggcactgattcaaaagaaaaacaccagaaactgaaggaagccattccgagacgagtatatacaagaactggccattaatttcttctataatcgtatattgtgttttctcccttcatgacatggcttatactgagatattctctctctgggctgtaagtgataaaacgtacggaggtttgagcttttcatccaagcaagttggtgaggttctttcattntcaggttttggtcttcttgtatttcaactatttctttatcctccatttgagaaactacttggacccatcaattca

SEQ ID NO: 5457 - DNA, 376 bp, Lilium asiatic
ggtgttcctcagctctaaaaagtctggcaaggggaagaggcctgggaagggcggtaaccgcttttggaagagcgttgggctgggattcaagactcccagagatgccattgaagggacatatattgataagaaatgcccattcactggcagtgtctcaatccgaggccgaattcttgccggcacctgccacagtgctaagatgaaccgaaccatcattgttaggcggaattacctccactatgttaagaagtatcagaggtatgagaagcgacattccaatattcctgcccattgttccccctgtttccgtgtgaaggaaggagatcatgtcatcataggccaatgcaggcctttggcaaagactgttcgttttaat

SEQ ID NO: 5458 - DNA, 441 bp, Lilium asiatic
ttctccaccattttttccaccttccaacaactccacaaccaccttcaccctccaacaccggcaaaagcttcatcaaggtacatctatctactctcttgtcccctttatgtcttatttggattgttatgtgtaggattttggaaaagcttggatttgtgtggcaaaatgaggaaaggatcaaagctcaagaaggaaaagagatgttgcaagcttaatgaggatgtgctctcacatctataagtacccctcctcccccattggattgaggtaagaggtctcactccggcccgagtgggggagggcacattgttggccgtctttctctcggttttggaggaggcacattgggagagcatctacaagtgatttcggagtggagagttcatcatggttcttggtttgggctctttcgtgagctttgagaaagtcatgtaagtggag

SEQ ID NO: 5459 - DNA, 431 bp, Lilium asiatic
  modified_base (406)..(406): a, c, g, t, unknown, or other
gaggttcagagatagggttgtcgatgaaggctacagccctagttacggagcgaggcccctgaggagagcgattatgaggcttctggaagacagtttggccgagaagatgcttgctggagagatcaaggagggggactcagcgatcgtcgacgttgatgctgatggaaatgtgacagttctcaatggtgagagcgggatgccaggagtattacccccggctgttactgtataacaggtttcactcgatatatctaggcgctagactcgacttgtatcgtcatggattgtagccctaactatttctgatggccgccaggtgattaattggttattttgttgtaatatgcggcctgcaggaaatgcacgtcatgcacatacaagctagaagaactagaagaacagatgntaattcgtgggtatttaattatact

SEQ ID NO: 5460 - DNA, 291 bp, Lilium asiatic
aagaagagggataggagatgaccctagaggagtatgagaagataaggaggagaaaagaaagcacttctggaaatgaaagctgaagagaggaaagttgtagttgacaaggagttggaggccatgaagccgctttctgttaaaaaagcaaatgatgacatctttattaaattgggttccgacaagggcactggaaagaagaaagaaaatactgagcgggaaggagggaaaaagccattgagtatcaatgaatttctgaagccagctgatggcgaacggtactttggtgggcgt

SEQ ID NO: 5461 - DNA, 142 bp, Lilium asiatic
  modified_base (121)..(123): a, c, g, t, unknown, or other
  modified_base (126)..(126): a, c, g, t, unknown, or other
  modified_base (128)..(130): a, c, g, t, unknown, or other
  modified_base (132)..(135): a, c, g, t, unknown, or other
  modified_base (137)..(140): a, c, g, t, unknown, or other
tgttgctgctgccggtctctttttatttactttaatgtttattgtctggtctgtttatctgtgtcttgatcttggatctatgtttgcgtacttaagttatttaaaaggagttttactttgnnnaanannnannnnannnnaa

SEQ ID NO: 5462 - DNA, 357 bp, Lilium asiatic
aatcaggttcaaactgtttttgttgatcatgacgtagcagttggggataatccatgtaggccctcttaagccagttatttcctctgaatcctggtttggtaattttggcgtttatgcttaaaaataaaaacttatcgtagttggcttgtgcttttcttatttagttggaggatagccatgagagttacttcattttgcatcaaaatatgtaccgcaatatgccattctatgggaataagtttgtttgaatgacatggctcattcaacgttttaggttacatgcttaagatgtcgtctgatgtcaatgtgttgtaagccacttgagactccaatgtttgcggttgtatgctttaagat

SEQ ID NO: 5463 - DNA, 442 bp, Lilium asiatic
gtgactgcttcagagttggcgcttattcacactgatggggaggaaccaaagagagaacatggaggtcccgcccaaggagaagatgaacatacatgtcttaccatattcccaagaagaaaattatcaaggtggaacccacctcacacgatggagatgccccgtctccaatgtggccacccaccaccggcgaaaaggaatcaacccaccctcaccaacgccaatcacgggtcgagtccctacctattagccgacatccctatccttggttgttaaacacgggttaaatggctcgtcatggcgatgttactattagaagtgcaacacaacaagacatccacccatgtgtttggcaaagcgtgccatggcgcaaccatcgtcgccatgcgccacggtacaaaggtttttggcaccaaatagcgcattgcgtgacagggacggagga

SEQ ID NO: 5464 - DNA, 70 bp, Lilium asiatic
aaaaaaaaaaaaataaaaaaaacaaataattttcaaacaaaaaaaaaacaaaaaaacccccccttttaaa

SEQ ID NO: 5465 - DNA, 293 bp, Lilium asiatic
cccacgcgtccgggaggaggaaccctatgagcaatccgttcgcaaaacggagtccgggagggcccaaaaatgagtttttaagaaaatctctttttttgctttttttgccggtgaatagtgccggctcagactaagttggctcagtctggctctgactgggctgtctcggtcggctcggactgagtcgactcagtccggctcgtactgggttggcttggcctggccgggttgggtcgggtctgattgaggtagatgggccgagtttaaagggactcgaacccactagcccttat

SEQ ID NO: 5466 - DNA, 339 bp, Lilium asiatic
gtcagtatgaaggtaaaggtaatggttagtactgttcaacatcctccgaagtatgggatggtggttacagtagtgtaggagcgatgaaaccatatcctcctccattccgtcagaggtatcctcctatcgggtttgctggcccctcttccgaatgggagcatgtgctgaaggaagatctaacactttagcttcttaatgcgaagtcgattgtaaattggtcgggcgttttgaaacatgtaggaacaaattattggagttggcattaagcagtgtaattagaacatggtgcttattcttgatacttatgtgttggtgacatgtgttatataactaaaccct

SEQ ID NO: 5467 - DNA, 330 bp, Lilium asiatic
cggacgcgtggggccttgttattaaatgttgaaatcctgattggtgtgttatgaaggcactaaagtattgaatccaaaaaaaaaaaaaaaaaaaaaaaaaaaaaaaaaaaaaaaaaaaaaaaaaaaaaaaaaaaaaaaaaaaaaaaaaaaaaaaaaaaaatataaaaaaaaaaaaaaaataaaaaaaaaaaaaaaaaaaaaaaaaaaaaaaaaagggggggccctttctaaaaattaaaagtttattcaccctgtatctgaaccataaaattcttttattggggaactaaaacacaatgggggcgccgcccttttaaaaacccttaattg

SEQ ID NO: 5468 - DNA, 230 bp, Lilium asiatic
cctatacatttttatatatttttatttattatataagcttacatacaagggcatggttcttttataatgttatataattttaattaaattcacttcattttacaacgttttatatcgtaaaaacttgtaaatacctaacttaatccaatttaatcacattccattttatccttctttctttatattaattaatacctaacatttcttcatttttaacattttctaacact

SEQ ID NO: 5469 - DNA, 398 bp, Lilium asiatic
gttagatttggatgcgaggaggcagttagcggatcaccgataagttccatgagtaggaaatgttgaacgaagatggaacactatggacacccgagtgcttgctataaaccgggctaatgactttctacacaacaacaaaaccacttgacaagtcatggcatgtgatggggctcgggtacaacccgagcatcagtcccgatgagatcctaaacgctgtagtcatacacttcaacgggaacatgaaacacgggctcgacattgacatgaaccaggacaagaatatctggtgcaagtatgtcgacaccgatatggagtttctccaactttgcaactatggcatttagaaagcattccagtgaaattcaagcgcacgccagttatactggagagtcattatt

SEQ ID NO: 5470 - DNA, 397 bp, Lilium asiatic
atttctttcttataaaattgtttctctagattttcgaatggtttgagtaatccttcttttcttcttgtcttaatcccgaaataaaaaaaacaataccacatgctcaaatatgaaagatattttaaaaagaaaagtaaaattgacttgtgaaatagcttgacttaaactttgaaaatgatttattttaagtgatgttgctgttccccggtaacgacgtaatttatgatccggttatgaatatgtattgctaaaataatgtattacatgctatttctaacctatatagaaatgtatgcactatccgactatgtggaaaaacttggctagataataatataactaggcctaagcctaggtcgatcctacggagagcagagtaagacttgcacttattggt

SEQ ID NO: 5471 - DNA, 380 bp, Lilium asiatic
gaaaaccggcgcggcccacgcgtaccattccttttatataaaacagtctctctagatcttccaatcgactgcgtaggcctggtatacttctagcgggaatccggaaacaaaacaaccaataccacatgctcaaatatgaaagatatttcaaaaacaaaagtaaaatcgactcgtgaaataccttgacttaaaccttgcaaattatttattagaagtgaagttgttgttctccggaaacgacgtacattatgatccgcttatgaatatgtatcgctaaaataagcgtataacacgctatttctaacctatatagacatgtatgcactatccgactatggggaaatacttgcctagataataacataactaggcctaatcct

SEQ ID NO: 5472 - DNA, 272 bp, Lilium asiatic
ccaacccttccggccttttgttaatttagaattccaccccttacactatgggtgcggtgaattccaataggctttaaggctaccaaactaccacactttcttggaggggttattgttgtgttccacacttttattaaccttgactgacacaacaatcttgggattttttttttattttttttggaactcctaaacttcttccttacactttctggcaataataaaatcaatcttttgattcaacaagttttggaaatcttcaccacatttaa

SEQ ID NO: 5473 - DNA, 381 bp, Lilium asiatic
ccacgcgtccgtagatttcaaaaaacaaccaaatgatggagcttatgtgcatacaggtcaaagcctctgcgatctatacaaagaatttgttagggacttccctattgtgtctatcgaggacccttttgaccaagatgattggaattcttggacttcacttcagtcttcagttgacattcaaatagtaggggatgatctgttggtcaccaacccgacgaagatagctgaggcgatcgagaagaaggcttgcaatagtttactactaaaagttaaccaaattggcacaataactgaatcaattagagctgctcttgattcaaaagctgcaggctggggggtgatggtcagtcacctagtggcgaaacggaaaaaaattttatc

SEQ ID NO: 5474 - DNA, 386 bp, Lilium asiatic
ggcggcttcaaagaacagcgactccttctctccagctccgcacaccgcctggtcggcaccgccgccgcctgcgtcaccgccgccgtcaccacctccactccaccagaccgacgccgatgaacaggataccaacgtgaagcagctaggagaatgctcctccatctacttagcccttcaggaatgcctcgtccgcacagatcggaattggaaatcctgccaacccgaagttcaggcattaaaatcttgtcaatcaacgaagaatgatgctaaagagaagtgaagccgtagcaccccatcttggtaatttgcttaagtattggtgaaattattagtatctttagagtgctttgagttatccagaaatgtcgggttttgtccttaaatct

SEQ ID NO: 5475 - DNA, 169 bp, Lilium asiatic
cggacgcgtgggttcgcggatgagatcttcgtgaagaagcataccggccctggtgtgctgtccatggcgaattcctggaagaacaccaatggatcgcacttctttatctgtactgcgaaaacttccttgcttgattggaaaccttttgtggtccggccagttgttgaag

SEQ ID NO: 5476 - DNA, 371 bp, Lilium asiatic
cccacgcgttcgccaatctcataattcaaatcccccatcccctttgcactgggtggcgccgaaatccgagaagaagcccgcggagaagaagccggtggcggagaagcccgccgccgaggaggagaagaagtcagccccgggaccggcggacaagaagccggccgagaagaagcccaaggctggcaagaagctcccggcctccaaggaaggggcctccgacaagaagaagaagaggtcgaagaggtccgtggagacctacaagatctacatcttcaaagtgttgaagcacgtccaccctgacatcggaatcttcagcaaggccatggggatcatgaacagcttcatcaacgacctctttcagaagattgcac

SEQ ID NO: 5477 - DNA, 354 bp, Lilium asiatic
cccactcgttcgccaatcttttaatttagatctctcatcccctctgcactgggggggctgaaatccgaggggaagccggcgtataataagccggtggcggataagcccgtcttcgaggatgacaagaagtcagcccctgaaccggcggagaataagcctgccgagaataagcccatggctggcatgaagctcccggcctccaaggaaggggccttcaacatgaagaagaataggtcgaagacgtatgtggagaccttcaacatctacatcttcaaagtgttgaagcacttccaccctgacatcggaatctccagcatggtcatcgttatcatgaacagcttcatcaactacctc

SEQ ID NO: 5478 - DNA, 277 bp, Lilium asiatic
cccacgcgtccgcccacgcgtccgctgagttgtattgtagcccatccaggatttctgagtgaattagtttgatgttgcagtccctttttagactatttggggtactattatgggtgtggtcctttatatccctatattatcttctgatgcatatgttgcaaactggtttatgctgatgtcttttttttccctccaaaaaaaaaaaaaaaaaaaaaaaaaaaaaaaaaaaaaaaaaaaaaaaaaaaaaaaagaacaacaaaatatacatattcaaggt

SEQ ID NO: 5479 - DNA, 349 bp, Lilium asiatic
gtttttaatgaagtgcattacttgttctagtgtaagagaggagtagtagctattgggaagtgatcaatgcttagaattaaatagttttatgtgatctttcgtgctcaaaaaaaaaaaaaaaaaaaaaaaaaaaaaaaaaaaaaaaaaaaaaaaaaaaatgaaaaaaatagaaaaaaaaaaaaaaattgggggttccaattatgagatatactcttaaaataagatgggacctgattgtaacgacaattttgtggagagcatagtttgagtttttcaaactaatgtaccttctcagattatgataacaccgaggtgtccaaaaaattttgcggtatgatacactttcttt

SEQ ID NO: 5480 - DNA, 381 bp, Lilium asiatic
atctagggtttgcggcgcgatctgatagaaggagaggagatggggcattcgaacgtgtggaactcgcatgcgaagagctacgggcctggatctcgaacctgccgtgtttgtggcaatccgcatgggctgatccgaaagtatggactgatgtgctgcaggcagtgcttccgtagcaatgccaaagaaattggttttatcaagtatcgctaaggcggtttcaaggctggactctggtttagggaatactatgccatgttggtctgattgcttagtaacaatgtcatcatttagtgcctgctgctattaaagtttggttatgttttggtttgtactgaggaatatgttgctttatttgatacttattgagcttattttatcgga

SEQ ID NO: 5481 - DNA, 291 bp, Lilium asiatic
cttcatcatcagccgccgttttagattatcaaaacactcaaactaagtccggcagcgtcctacttctagcgtgccgccacaaaacaacaatccaatcgccgtcgtactacaacctctatgctaaaaaaaccatggcaccccccatattaatcttgttgcacaacatccttctttcaccagctgtcataataacgaagaggccagcactcatcgttcttaccaactgctcagcattcacaatgaataatacgaccccccctgcatcgcatcattcaccgcggttgttgtggt

SEQ ID NO: 5482 - DNA, 396 bp, Lilium asiatic
ctttgtgtcaagcacaccatatactatcaaaatattggcgataggagcgacagggggtctgatcttgtggttgagctaaagaggatatttgaaggtctctcaattcaatataatttgctgccgcaagacgttcgtctcagctacagtggttcgacaccaatttctatgcctattaaccaaacctcctaaggatgttcgcctcaactacagtggctcgataccaattcctctgcctattagccaaacctactaaggtgctcaactttcctttagaattatgttactactgaaattgctaatcgatttcatacttttttatttatatgttttcgaggattgctagatatgtattgagttgtatcttttagtaattgcattatgttgatgaaacttatt

SEQ ID NO: 5483 - DNA, 379 bp, Lilium asiatic
tcgagactccggcctttactccggtcgccgaagatgctccggcggcgaagccgggcgaggcgaagaaggcaaaggtcccaaaagagaagaaggcgtctgtcgcgaagaagcccgctctccatcctacctaccttgagatgatcagtgaggcgatcacttcactgaaggagcgaactggatccagccagatcgctatctcgaagtttgttgaaaataagcacaaggctcacctgccggccaacttcaagaagctcctcctcgtccagttgcggaaactcaccgccgctggtaaactcacgaaggtcaagaattcctacaagatctctgccaagcccaccactgctgctaagcctaagacaacctctgcaaagtcaaccac

SEQ ID NO: 5484 - DNA, 90 bp, Lilium asiatic
ggggaatcaggatgggacctactccagatgcaaaggcggaaggggctgctcagatgtgtgccggcctgcagctgctgggaggaggccttc

SEQ ID NO: 5485 - DNA, 374 bp, Lilium asiatic
ggccgcgggaggagcaccaaatcccaatcctctcatcggaaacactgatggggatccggagagtgtggcgcatgagaactcactgaccgattcttgtaggttgttgtgggtctccagtttctcatgagcttgatatcatctactaccatccaactaattagtggacaaggtagaaactttaaagcgctacaaattcagcttagcttttgagaattccaacgaggaggattatgttactgaaaaattctttcagtcccttgttgcagggtgaaagcttaaacaccttcaaaatgaaagcaccgacaagggtaatatctggttctgatgcaaatagaggttatttcactccttaccagtcaaagttttgcttggat

SEQ ID NO: 5486 - DNA, 428 bp, Lilium asiatic
  modified_base (402)..(402): a, c, g, t, unknown, or other
ctagagttcagtctggatggatttgtgtcccgtgaataccacagttctcctgggtactacgatgggcgctactggacaatgtggaagctgcccatgttcggctgtactgatgctgctcaggtggtgaaggagatcggcgagtgcaagaaagagtaccctgcagcattcgtccgggtgatcggttttgacagtttccgccaagttcagtgtgtcagtttcatcgccgaaaagcccgagtagaccatcagttgaagctaccatgttctttgtcaatcgcttgtttcggttataatgttcgttttgaagtttgcatttgcttcctcttggtggtctatgtttaaatttaatcctctctttgtaacaatggagaacctaatctggccagttctacctatggctctnggttggtgaggtgaataatgagtttt

SEQ ID NO: 5487 - DNA, 135 bp, Lilium asiatic
ctttctcccattataagcgccttatttttccctaaattcttaaatagacgcggtggcgtatcttgaaattattgttgctcttcaaatattatcaatgaacgtcattttttccttttaactacaatattataacct

SEQ ID NO: 5488 - DNA, 400 bp, Lilium asiatic
tgtgcggcccaatcgcgcccaggacccaggccttatttatgacttaaccgctagcgactacatgaactttctttgcgccattggctacgactcaacacagttatctaccttcagcagaacatactcgtgcccttcgaaacctctgaagattgaggacttgaactatccgtcagtcaccgtccctgatcttgctggcgcagtcacagtaacacgcaaggtcaagaatgtaggagcaccgggtacatacaaggttcgagtgcagtctccaagagggatttcagtgtccgtgaagccgacaaccttgcgattcacgagcgttggcgaggagaagagtttcgaggttaagttggaagttaaggatcatcatgtagcaagagactatgtttttgggagaatgata

SEQ ID NO: 5489 - DNA, 162 bp, Lilium asiatic
gtcacgccgagtaaacctgagatctgcgttcatggaggccggaactgaaactatcgcctatcaagcgcgaatcaatcagactctatatactcaatatgaacaacattgactccaacaaggagaaactactgcaggggcctattttgaacccattctatgcgc

SEQ ID NO: 5490 - DNA, 348 bp, Lilium asiatic
  modified_base (344)..(344): a, c, g, t, unknown, or other
cggacgcgtgggcccgccgcggcggtgtgaagcgcatcagcggcctcatctacgaggagacccgcggggtgctgaagatcttcttggagaacgtcatccgtgacgccgtcacctacaccgagcacgcccgccggaagacggtgacggccatggacgtcgtctacgctctcaagcgccagggacgcaccctctatggcttcggcggctgatctatctaggagggtttgcgtttggtgctatgtttggatgtggatggcccttctttatctttatattttgctttggtggatgaaaatcttggggtatccgtggaggaagcgtattcgaacttaatcagcttaaanaaaa

SEQ ID NO: 5491 - DNA, 375 bp, Lilium asiatic
cccacgcgtccgcggacgcgtgggggaaggagctccccctgcagcgcctgaaggtgaggcacccgcagtaccagagccagaggcagctcctgctaatgaatgaactggacagcgtgttgtcatttctttctatcccgtaatgatttgtagtatctcaggccatatttgttacggagaataaagactgatctttgtagtaaagctgaagtctcctctagcagaggagtctctcagaaatttggttccacagtattgcttattgtgttgctttttggtttgttgaggatggttattaacatacttgatctattcttttgagatgtacctgtagagaaaaccaactctgaatttcttcgttacccttacatgtatcta

SEQ ID NO: 5492 - DNA, 401 bp, Lilium asiatic
cgctaacaaaaatctcaaggctgataagttggaactcaaggatgagaaactgagggttaaggccgagaaagagcgggttgagcagatgctgaaagggatgactctagtaccaccgctagtatcgcatcctgctgccgcagcgtaccatgctgttgctttcgctgcttgcaacaaaaacatgccatatcggagcttcccaccgatgggtatgtggcagtggattccgccaacatctttggatacttctcaagatcatgtgctaaggccgcctgtcgcttaattaattttcagtcgatcacccctataaatcgaccatttctggtatagttgatcaaattgccaaacaatttatctgggagaaaattctggtatatttgattaaattgccaatcaaattaact

SEQ ID NO: 5493 - DNA, 395 bp, Lilium asiatic
caacgccatttgaagcaacatggtagtcccaaagtgcttttaaagttgctattgcgaatttggaaaacactgtggctgatcaaatatcttcaatgaacgtagttatggattttaacttccataatataatggaatttctacgacttgtgcggctatccatggcgtcgatccaccgttgattaaaagaaggccactgacaaaatcaatttgattacatgggaaatgctatcttcactaaacagtgaaagaggtatctcttaaagatttggaaggaaaaatctaaggaaaccctttcacttatttgtacaaattttccttaaagatgtagcgaaggaaagaagccactgtaaaatcaatttcgctaaatggaaaaagattcaaataggttttgaagt

SEQ ID NO: 5494 - DNA, 425 bp, Lilium asiatic
gttttgcccttcacagcaaaagagatggcggccaacggcgatctgaggtcttctgagaagaaatcaagcgacaccggcgacgatctgcccatattcaatggcgagaatctgcagagcaacatgagatcgatctactacagccgtaccttcctgtctattattggaggagtagttgctggaatatggggattgactggcttgatgggatttgtcttttactttttagtaatggcagttgcttctttgggacttgctgctaaggcaaaattttccgttcataagtacttcgacggctggaataggattgcaattgatggggttttcggcgggctcatgtcgttcgtgctcttctgggcatttgcttatgatattgtccatattttctgaggatcaagggctgctgctgcaacagtttggaaagatgt

SEQ ID NO: 5495 - DNA, 388 bp, Lilium asiatic
gttcgtcggcggccgagtccgtgcatctccagcggcgatggacggcggcgccgggtccgacgagacctgctactactccatccttcagatccgcaagaacgccaccgcggccgacgttcgcgctgcttaccgcaagctcgccctgaagtggcatccacatcggtgggcgagggacgcgaaggccgccggggaggcgaaccggcggttccagcggatccaggaagcgtactccgttctctccgacgaggcagagcgggctatgtacgacgccggactcttcgatcctttcctcgatgacgatgacgaagacgaagttgatatcactgacttcgtgcaagagctgcgttcgatgatggacagcatgaaatcggagaaaccagctagtttg

SEQ ID NO: 5496 - DNA, 383 bp, Lilium asiatic
gaaatcggttgttgataagataggaccgctgaccggccgtgaggagaaaagcttggaagttttcgaggtgtcccctgattcaagtaccattgcgttcattggcaacgaaggttatatacttttgatttctgcaaagacaaaggagctaataggaactgttaagatgaacgggactgcacgctcgttgactttcgccgatggtgggcagcagctactgagcagtggtggtgacgggcatgtttatcactgggatcttaggacaaggaagtgtattcacaaggctgctgatgaaggctgcttaactgggtcggctctctgtgcttcacctgacagcaccctgttcgcagcaggctcggatactggaatagttaatgtctataaaa

SEQ ID NO: 5497 - DNA, 379 bp, Lilium asiatic
gagatctacttttcttctccctctgttttatctttattaggtaagaatgatttgaactaatttgaaatctttgtttctattttcagtattcgagcgtgcaaatgatcgtgcggggaagatccaaagagtaggagattggctataaaaggatggtgatcctgatgaagaagagggcgaggcctagccgagggccagtagggagaagatcaagtcctgcatgtcctctagcatggaggaagcctcagttacttcgttcatcctagagttctcgggttgatccggttttaagatcttcataattgagtgagagttgtaattcatgagtgattgagaggttttagttaaattatgtatgagtttttaatcttctggagatgta

SEQ ID NO: 5498 - DNA, 302 bp, Lilium asiatic
ggaaaaaaaaaaaaaaaaaaaaaaattaaaaaaaaaataaaaaaaaaaataataaagggaaaaaaggaaaaaaaaaaaaaaaaatataaaaaaaaaaaaaaaaaaaaaaaaaaaaaaaaaaaaaaaaaaataggggggggccgttttaaaggatcaaggttttttttcgctgttttgcaacgtaaaaattttttttttttgggatttaaattaaatttattggctgtggtttaaaaaaggggtgattggaaaaaccttggcgttaccaaattaaattgtattgcgaaaattaccctttttgt

SEQ ID NO: 5499 - DNA, 115 bp, Lilium asiatic
gttctaccctgcactccatctgtgtttttgacttctttcttacctgcgctctaatggcattttggcaatcttctccggctacctttatacaatattcaatggccataatcttccg

SEQ ID NO: 5500 - DNA, 421 bp, Lilium asiatic
cgaagtacatctatattgctggatttttcctaacagtgtctccagaggcaattttgctcgtagctgagcatgcagctgcgaatgacaaggtatttatgatgaacctgtcggctccttttatctgcgagttcttccgtgatgcccaggagaaagctctgccttatgtggactatattttcgggaatgagaccgaagcaaggactttctcgaaggtccacggttgggagactgataatgttgaagaaattgctctcaagatctcagagctgcctaaagcatcatctcgcaagaggatagctgtcatcacccaaggttgtgatccggtggtggttgcgaaggatggaaaggtgacgctattacctgtgattcccctacccaaggaaaaattggtgaacacgaacggagcatgtgatgcgttcgt

SEQ ID NO: 5501 - DNA, 271 bp, Lilium asiatic
cccacgcgtccgctgcatcccagggctgtgaattgccggaaaaagaagtgtggccacagcaaccagctgaggcctaagaagaagatcaagtaaatgttggcatatgggggtcattatggtgcattgcagcttgaaatatctagtttatggttagctgaatgcccatttgacctgaaagagttgttttgtcctttgatgttgaactagtctggatcagatgttggattatgtttttgattttgaatatgcacttatttcaactttcttgttc

SEQ ID NO: 5502 - DNA, 395 bp, Lilium asiatic
cagaacctcagacttcaactttagcttcagtttcgatggagactggatcgaaggccaagaagggcgccggcggacgcaagggcggaccgaaggcaaaatcggtgagccgatccgtcaaggccggcctccagttccctgtcggcaggattggccgcttcctcaagaaaggccgctatgctcagcgtgttggctctggagctcctgtctatctcgctgccgtgcttgagtaccttgctgctgaggttcttgaattggcgggcaatgcggccagggacaacaagaagaatcggattgttccccgacatgtgtgcttggctgtgagaaatgatgaggagcttgcgaggctgttgggcggtgttacttttgctcatggtggagttctgccgaacatcaac

SEQ ID NO: 5503 - DNA, 385 bp, Lilium asiatic
cttcagcacacggaaataaagttatcatagcaaattctcattcaaatgaagagctagtgaaggtggcatcatgaaagcaccctcacaagactcaacgtataatggtaccatggaatgcaaattgctcttcatcacatggaaataaagtcttcacggaaaatgctcattcccaagtggaaaagccagctacgggacaaggagcgaccggatcagctatagcgtctagatatgggcttaacataattgacaacaggatgcaaaagcctcagcgcattgaagcaggactgaatcttaggaagatcgcatgtgacatattgatgactgaaaattcacagtgtgggaaggcagaaattaacaaagagaaatcacatagagaggtggcaaa

SEQ ID NO: 5504 - DNA, 328 bp, Lilium asiatic
cccacgcgtccgtgtagctggtaatctgatggggaagtacgcggagcttctggacgtgggtgtcaggatcgccgtacgctttcactctcactgcccccagaccgcccgcatgtactacaagcccccatccaccgcccacaacgacggcgctggcaagggcggcgccagagcagccgccgctaggatatttcagcaaggcaccgggcttgatgcggaggagatggtcattctttactctgttgcttagcttgactttttcccctcaattttgatttggacagttggtgttaaagagtatgggatgagatgcttttaattaaaaaataaa

SEQ ID NO: 5505 - DNA, 431 bp, Lilium asiatic
ctcaaatctctcatcaatcatgtcaggccgtggcaagggagggaaggggctcggcaagggcggcgctaagcgccatcgcaaggtgcttcgggacaacatccagggcatcaccaaaccggccatccgccgcctggctcgccgtggtggagtgaagaggatcagtgggctcatctacgaggagacccgaggcgtgctgaagatctttctggagaacgtcatccgcgatgctgtcacctacactgagcacgctcgccgcaagacggtgacggcgatggatgtggtgtatgctctcaagcgccaggggcgcaccctctatggctttgggggttgatctagttctcctgtcctgggtctctgttagtttttggttggatggtaatttgggttgtcatggtccggttcatatatctcgtatgaaatgcaattagctt

SEQ ID NO: 5506 - DNA, 432 bp, Lilium asiatic
cggacgcgtgggcaaaagctgtggtatgttcttttgaaggaaaagaacatgttaatgactcaacgtcagatgcttaatgcagaaaatctacggtttcctcagccagagaggattccgaaggtaagaaagtcaatgtgccggatcaagcatgtgttgactgagagagcaatcgcggagcctgatcccaggagatctgctgagatgaagaggatgattaattccctgtgactcatctagttctgcatttatggaatggatattttagttgtggtatctgttgccaataaaaactgaagaaaatggattatggtattctgcaatgttgttaatttgctgtaatctttaaaagaacgttgatcttttgttgttttacgaagaaacagtctaaaactttgcaatatcctgttcttacactaatgtgaaatgggaaaa

SEQ ID NO: 5507 - DNA, 361 bp, Lilium asiatic
tcgccacgcgttcgtcacgcgtccgtggacgcgtgggcagacgcgtgggagaaaaaagggataaaaaaaaaaaaaaaagagaataaaaaaaaaataaaaaaaaataaaaaaaaaggacaatacatagactggctcgacgaggtggaatgaagaggatcagtgttattatttacgacgagaccctgagctggctgaagatatttatggagaacgtcattcgagatgctgtcacctacactgagcacgctctccgcaagaaagtgactgtgaaggatgtggtgtatgctctcaagcgccaggggcgcaccatctatggctttgggggttgatctaattgttctgtcctgggtctctggtagtt

SEQ ID NO: 5508 - DNA, 342 bp, Lilium asiatic
cgaaggaggtggagttcttgaaccatatgttggacaagcccatgctggccttcgggatccctctgggatgcatggcccggacgaaggtctgagcaaacttgcggtttctcgtccccttatacaattgggtttccccaaccttcatcgtttgggctatcattcaggttggtgatttacaagaaattgggattcttgtttaccttttttgtgttttcctgttagttgatgttcttcgactcacccatgaaacaaaattttcggcatgatcaattcagagaagatatatagtagattcgattggactgcgctcccgccagtgacgagagcagcatgtcaccgcat

SEQ ID NO: 5509 - DNA, 413 bp, Lilium asiatic
ggtcattgaacgtactgacgtgaaggaaaagatggatatgctgaaggcagaactctcaaatgctggagtatcaaaggtctctgatctcgacgataaatcaaaagagaaaatagtgaaggtaaagaaagagattgagtctgaaatagccaagacgttgaaatccttgcagttggaggtcgaactagttgcctcgaaagaaaaaacttcaaaagctagggtccttgttgaacaacctttgtactctgaattgaaagacaagatggacgaacttaatcacgacattcaacagggaattgaagatgttgtagattcgactgatctgaaggataaattagaggtgttgaaattggaggtggcaatggcaggtaaatctcctgatactgagaccaagaataaaatcaatgcactgaagc

SEQ ID NO: 5510 - DNA, 188 bp, Lilium asiatic
cccacgcgtccgaagaaactagtcatgtgattttctttttctttgcatagcaacagaataagctgaattggtctgtttgcttatggtgatatgtcaaattctcttatgtttcttgttatttttttttgtccggtataaactaaaatttttatctctggaatgtaaaagattatataggtggtgtaatt

SEQ ID NO: 5511 - DNA, 433 bp, Lilium asiatic
  modified_base (359)..(359): a, c, g, t, unknown, or other
  modified_base (378)..(378): a, c, g, t, unknown, or other
cggacgcgtgggcccatactgtgccctgtaaggttactgggaaatgtgggtcggttacagtgagaatggtgccggcgccacggggcgctgggattgttgctgctcgtgtcccgaaaaaggtgctgcagtttgctggaattgaggatgttttcacctcttcgcgtgggtctacaaagaccctcggtaactttgtgaaggcaacatttgattgtctgatgaagacctacgggttcttgacgcctgatctgtggaaggagactcggtttgtgaaatccccgttccaggagtacactgacttcctctcaaagcccaccaccaaggctattctaatcgaagaggtcgagagagctgatgcttangaactggtttctgcttccncttattcattgctgtcatttttaggttattaaccgaacttgcaatgtgaaaattt

SEQ ID NO: 5512 - DNA, 255 bp, Lilium asiatic
agatccttaaagaaacacatgtttatctttttttcccacaataacctatgaagagacgattcttaagcaaactctgtcacaaacaataaactcaccatacacaattgcaatatcactttataaccaactgtctttacaagagttgtacattttcaaactttcttattaccaactactctcactaagcgcaattattggtacacagccattatatatttttctgacacaattctccaacatgcacaaacatttcat

SEQ ID NO: 5513 - DNA, 402 bp, Lilium asiatic
  modified_base (379)..(379): a, c, g, t, unknown, or other
accacctgagagctctaatggcgagcagctcctcctcctccagcatccttcaacgccaagtcttcccacctcctgagagcgacaaggacgtcgacaaggacgttcacttcctcctctaccttcctgaagagcttccactgatggcgacctttcaatcttcctccaccgtcaacctcgtacctgaaggcgactcctccacgacagccggcttacttcgtcttcaaggaagaagacgagggcaactgcagcgaaagcgacctctgaaacattctccaccgtctgcatgcatcatcagtgagctccagaagactcaagaagatgaaccagagccgttcaaatctcttcattccgatcaaggtaagatctcatattgatttgntactgatgattggttctttttat

SEQ ID NO: 5514 - DNA, 357 bp, Lilium asiatic
ggggatctaaagcaagccttgtcaactcataatatgagaattcacattgataatattattcagaagcttactctgtcacaggcaattgacacacgagatgcgttggcaaaatcactatatgccagtgtgtttaaaggagtgatttactgttgcaaaacttattgggtgcaagtatggtgatcaagcaaggataatggtaagcaggcaagacaaatctctgaggcacaatccccgagcatggacaaagctctaaggaagcaaatgcaaaatctaacatacagtaatggattagggattctctggcatggctgcagtaggtatgatcttttagaatcaagaagagacaatgaaagtgac

SEQ ID NO: 5515 - DNA, 383 bp, Lilium asiatic
gagatattgaagttcaaacctgacttttttataactgaaaaaggtcttagcgatcgggcatgccattacttcagcaaggctggactgagtgctatcaggagggtgagaaagaccgacaacaaccgtattgcaaaggcttgtggtgcggtgattgtcaacaggccagaagaattgcaagagtcctattttggaaccgatgcatggctttttgaagtgaagaaattcacggatgagttattctcatacatcgcttactgcaaagatccaaaagcctgtactgtacttttaagaggctctagtaaggatcttctgaatgaatgtgatagaaatgtacaggatgctatgtctgtagcaaggaatttactgtataacccaaagcttct

SEQ ID NO: 5516 - DNA, 424 bp, Lilium asiatic
gtcattgaaaaggagaacaacttcaagcagcctggagagagataccggtcctttgatcctgacaggcaagagcgctttatccgcaggtgggttgacgccctgtctgatccacgggtcacccatgaaatcagtagcatatggatctcctattggtcccaggctgacaggtctctcggtcagaagctggccagtcgcctgaatgtgaagccgatcatgtgatttgggttaaagaacaagagaatcacaaaagagaaaacttatgccagacttaatatacttgcaatcatctgagtgtggtttgctgtactaataatgtagtaagtaatatgccacttctaatgcagggaagtgtggaactgagattaccttgtatgatgcatgtatggctatgctcctacctgctgaatgcttgaacctatttttc

SEQ ID NO: 5517 - DNA, 380 bp, Lilium asiatic
agatccttcaagaagcagatggtatctttctttcccgagggaacttatgaatagacgcttcctcccgaaaaggctgtcttgtttcagaagtcagcagttcataaatgtaatttggttggaaaaccagcaatcattacaagagtagtggatagcatgactgacaatttacgtcctactcgtgcagaggcaactgatgtggccaatgcagttctggatgggactgacggcattctcctaggggctgagacatttcagggcatgtatcctcttgagacaataaagacagtgggtagaatttgtgctgaagctgagtgtgtttataactacacccttcactttaagaggatagtgaaatatgttggagaaccaatgtcccatgc

SEQ ID NO: 5518 - DNA, 431 bp, Lilium asiatic
cccacgcgtccgcaacaacaaagattaacgctgcacagactcattgcgatggttgaatcagaacgcacataccatcggaggatcttacaaatccttgatcagcttgatggagagctcttatcggagcgccaaagaattgaagcacctccaaccccagtagtggaagaccatatgccgccgcctccctcgtatgaagaagccaatggcgtctttcattcacaaacttttgaaggatcaactgattccatgggatactttttgggagaggttatgcattcatatcaggctgagtcggatgtggagcttagcttgtcagttggggattatgtcgttataagaaagctctctgacaatggctgggctgagggtgagtgcaaaagtaaaagctgttggtttccttttggatacgttgagagacgggaacgtgtgct

SEQ ID NO: 5519 - DNA, 383 bp, Lilium asiatic
gcgccggaggccgcaagggcagtggctcaagggcgaaatcggtgactcgctcagtcaaggcggggctccagttccccgtcggaaggatcggccgctacctcaagaagggccgctacgctcagcgcgtcggatctggagctccggtctacctcgctgccgtgctggagtatctcgctgccgaggttttggaattagctggaaatgcggcccgggacaacaagaagaaccggattgttcctcgacatgtgtgtctggcggtgaggaatgatgaggagcttgggaggttgttgggtggggttactattgctcatggtggagttttacccagcatcaaccctgtcctgctgccgaagaagactgggaaggagggggtggagcccaag

SEQ ID NO: 5520 - DNA, 369 bp, Lilium asiatic
gccagtctccggttgagttcataaatgcgctgatttcatcacagagtaaggatttgaagatggttgctggggaggcaagtcggaatgcggagagggagcgtccatctgatttctacaaccaaccatgggtcgaagatgctgttatacgctatctgaatcgcaagccggcaggcggtaatgatggccctggaagcacatgatgcatctcttctgtttgggagaaggaaaccatgcatattttcaaaatggcgagtttcgttgtctggagttcaagaaatcaccctggagtttaagaaatcaccggttgtcttttcatggatgaatgccgtaccattaggtaacttggttgatcagatgaaattgtttgat

SEQ ID NO: 5521 - DNA, 390 bp, Lilium asiatic
cccacgcgtccgggtccggcaggtgggcgccgcggcgcgcgccgccggggtgggcgtcgcgggcgagaacgcgctgccgcggtacgacggcacggcgcacgaccaggtggtcaccacggccgccgagcgcgccgccgaggaccggatggtggccttcacgtacctgcgcatggggcccgacctctttcacccggacaactggcggcgcttcgccgccttcgtgcgccgcatgaacggcgccgggtcgtgccgggaggccgcggagcgggaggcgcacggcgtctcgcaggccaccgggtcgctggtgcacgaggccgccgtcgcgctgcggagctgaccggccgggacgggacgggacggaacggaagcctacgatcgactggacataca

SEQ ID NO: 5522 - DNA, 105 bp, Lilium asiatic
gcggaaaaaaaaaagaaaaaaaaaaaaataaaaaaaaaataaaaaaaaaaaaaaaaaaggggaaaaaaggaagaaaataaagaagggaaacaaaaaaaacatgaa

SEQ ID NO: 5523 - DNA, 394 bp, Lilium asiatic
cccacgcgtccgcttgcattggatttatcttcccagctgctgtaaccctcagggattcccatggcatagcatcgaagagggataaggtcttgtccgtatttatgattgttcttgcggtaatgtcatatgcagttgctgtatatagtgatgcttactccctctttaacaagagtaagtcctctcattcttgagctgtcggatcatgggcgagggtcaatatatttagcttggtttgatgctaaatatatagaggcccatgggagatgtgttattagcttgtcttgtctaataagatgtaatgaacttaatttataacttgagttaatgtggaatatactgcaaatcaaactatatatatatttcgcgtgtatgtttaggggatatgaaatcaaat

SEQ ID NO: 5524 - DNA, 296 bp, Lilium asiatic
acaacaaagaattacgctgcttatactcattgccattgttgggacaaaaggcgcataccatcggaggatcttacaaatccttgatcagcttgatggagagctcttatcggagtgccaataaattgaagcaccttcaaccccagtaatggaagaccatatgccgccgccatcctcgtattaagaaaccaatggcgtctttcattcacaaacttttgaaagatcaaattattccatgggataccttttgggagaggttattcattcatatcaagcttagtccgatgtggagcttaact

SEQ ID NO: 5525 - DNA, 426 bp, Lilium asiatic
ggaatatgaatctcaggagaaggaactcgtgcagcttaagcgagaggctaggttggagggcggtttctatgtcagcccggaagccaagttgctgttcatcatcagaattcgaggtatcaatgcgatgcacccgaaaacacgaaagattcttcagctcttgcgcttaagacagattttcaatggcgtgttcctgaaagttaacaaggcgactgtgaatatgcttcaacgcgtcgagccatatgtgacttacgggtatcccaatttgaagagtgttagggagttgatttacaagaggggttatgggaagttgaatgcaaagaggattccgctgactgataactctattatcgagcaggggcttgggaagcatgatatcctgtgcattgaggatcttgttcatgagatcatgacaggtgggccacactt

SEQ ID NO: 5526 - DNA, 210 bp, Lilium asiatic
cccacgcgtacgcggagcgtggggaaattaaaacttcgctttagggctgaaaagggaaaaaaaaaaaaaaaaaaaaaaaaaaaaaaaaaaaaaaaaaaaaaaaaaaaaaaaaaaaaaaaaaagcaaaagacgaaaaaaagaaaaaataacatacacctttaacaaaaaaaaatacatcttttactgagagcggtccaaaaaaagaacaag

SEQ ID NO: 5527 - DNA, 326 bp, Lilium asiatic
ttcatacctcaaaggagtagaattgttgcagactgcttactaattctgaaaaggggggtggatcttcgacttgaatagaccccttttggcaattatgggtttcatacaactctataagtatagaatgatcagaactattattattttccgaagttgattatctaagaacttagtttatcagttatgcttgtaagttgaggcaaatagttacagtttccaactcatgtatcattttccaggttaatggtgtcatgaacaatgtagtagatctatggcaagggactgcaatctggttcttggcataatattatgttgtttcgcttgat

SEQ ID NO: 5528 - DNA, 427 bp, Lilium asiatic
  modified_base (406)..(406): a, c, g, t, unknown, or other
  modified_base (415)..(415): a, c, g, t, unknown, or other
tgccaatcgtgacccttcattttgaggggatggatttggttctacctgcggagaatgcgctgatacacagtagcgcgacccggctggcgtgtctggcaatggctgcggcaccggataatgtgaatgctgtggtgaatgtgattgccaatctgcagcagcagaatttgagggtgttgtttgatgttgcaaactcaagggttgggtttgctcgcgaggtctgcaactgagctggcgtttgtttgggagtgtggtaataattgttcacgggttgcatctgtgttttgtatgttggttttgtctgagaagaagttgagagtgtgtttgtgtttgaaagaaaatatgagattttctctgtgtaaactatgttttggagaacttgtggccagctatgttttgtatctatgtngattatgtngatttgaaagct

SEQ ID NO: 5529 - DNA, 377 bp, Lilium asiatic
ggaggtgcttggtgataaggttgagatggttgtggtttctgaccgtgtggttgatgctccttgctgtttggtcacgggtgagtatggatggacggccaacatggagaggattatgaaggcccaagcgctgagggactccagcatggctggttacatgtcaagcaagaagaccatggaaatcaacccggagaactccatcatggaagagctgaggaagcgggctgatgctgacaagaacgacaagtcagtcaaggaccttgtgttgctgctgtttgagactgcactgctcacctctggtttcagcctcgatgagcccaacaccttcggcaacaggattcaccgcatgttgaagcttggcctcaacattgacgatgatg

SEQ ID NO: 5530 - DNA, 394 bp, Lilium asiatic
gggtggagttggctgtttgttttcgaaggaaatgttgctagtctgcctctgaaggtgctcctgcaaccatttaattgtttcattttccttcccccagacacatttctatttatctttgtataattttaatttggagtttagtattaaagagcttgtcttgtgtttcattgagttctcaaaatgattgtggttttcaatctgttatattttcttaaattaagatgggacatgattgtattgagaattttgtggagagcaatgtttgtgtttttcaatctaatttaccttcttaaattaagatgtgacacaattgtattgaaaattttgtggaatgctagagttacatctaagaaagattggacattcttagctgggacctttttcgtagctggaa

SEQ ID NO: 5531 - DNA, 426 bp, Lilium asiatic
  modified_base (374)..(374): a, c, g, t, unknown, or other
ccaaattccgccctttctcaccggcggcgagctcgccggcgttccgccttaacccggtgccttgtccgacaacgccgacgagatcttcccgaatcccttgcgaactccccgcgccgccgttcgagtatggactttgtcgataaaatcgaggtccccggggacgctatcttagatctctcaacaatggccaacaaaacgatcaaattgggggcggggctatgccaggacttcgacgcgatcacagtgatgaaggctgggaagctgaagttttcgaatccgaacaagtattgggtcgagagctcgcacaagaggtatgtgccatctgagggagatgccgagcttggcattgtggtcgatagtaaaccggatgactntctagtggatataaagggatcctcattggcaaatatatctgtactcgctttc

SEQ ID NO: 5532 - DNA, 431 bp, Lilium asiatic
tgggcagctaagctcagggacgacctccgcaccctccaagaggacagtaaggcttgagttcttgcagcaaatgcccgattttaccacgccttcaggaaaggggatttagcagccatgcactcggtatgggcgaaaggcgataatgtgtatgtcatacacccgggtgctggcaggatatctggctacaatctggtgatgagaagctgggagattgtgtgtggcgcagattatgaattccctcttcggatcgatctagaggatgtcgaggtgcacatcagaggcgagctcgggtatgtaacatgtatggaggtggtcaagaccaaaggcaacagttgggggaagcaggttgcgaccaatgtgtttgagaaggtcgatgggcgatggtttatgtgcatccaccacgcctcgcacattgatgaatgatgcttttg

SEQ ID NO: 5533 - DNA, 419 bp, Lilium asiatic
aaatcgattccctgaaccctgacgagctcttcaaggcggcggaaagcggcaactcatcgccgttccgatcgctttccggcgactctctccacagcatttcgtcgctgcggaacgaggacggccggtccctcctccacgtcgccgccgcatccggccaaccagaggtggttggtttactgaccgttgatgatctgtcgaagagtactgttaattgtgcagatgaagaaggatggacgccccttcactcagccgcaagcagtggccatactgaaattgttgagatcttggttaaaggaggagcgaatgtcaatgtggctaatgatggtggacgaactgcacttcactatgctgccagcaagggacgtctgaaaatagctgaaatcctgacatcccatggtgcgaagctcaaccaaaaagat

SEQ ID NO: 5534 - DNA, 336 bp, Lilium asiatic
aatatacacacacataattgagatatgtacagtcgatgtgataaacagtaatatcggtgatttttttgtaaataatttgaacattcctaccatgttcacaatgtttattttagaaacaaccggtgatttcggtaccaagacagaaccactccttcaacatttagcggttgtcctttctaacgtagaacgctcataagtccttattattctagagaacattaatcaacatatttcttttaccatccatcatacaaaagaagaatatttactttttatagatgaaactaaattttaatgttgtaaaaaaactattagaggcattatattcaagaaaaa

SEQ ID NO: 5535 - DNA, 104 bp, Lilium asiatic
gaagaacaatgctattgtctgcaacattggtcacttcgataacgagattgatatgcatggtttggagaccttccccggcgtcaagcgtatcaccatcaagcccc

SEQ ID NO: 5536 - DNA, 347 bp, Lilium asiatic
gcctctttggtattctctgtctgctgttcaatgtcaaatgctccttcttttcggggaaaaaaaaaaaaaaaaaaaaaaaaaaaaaaaaaaaaaaaaaaaaaaaaaaaaaaaaaaaaaaaaaaaaaaaaaaaaaaaaaaaaaaaaaaaaaaaaaaaaaaaaaaaaaaaaaaaaaaaaaaaaaaagggggcgcccgttcaaaagaaacaaactttaaccccccaggattgcaaagtaaaaatttttttaaagggcaaccaaaataaaaataattggccccctttaaaaaacggctaaacgggaaaaaccctggggttcccaaattaaaaccctttgcaaaaaatcccct

SEQ ID NO: 5537 - DNA, 381 bp, Lilium asiatic
cccacgcgtccgacgaaggcggcaaataccggtactcggaaaatattaccgtgagcgcaaaaaatcggggcctctacctgtccacttgttcgggatgttgatgagaagcatgagagtcgatcactttgtgagcgatgatggagatgttgtgtactatcagactgatcctcgactaaacggcgaatatcagaaaataaaagattattagcttcctaaagaggaaatgcattaatgtaagaataaacatatatgacactagatgagttcttgcctagtgtctctaagaattttgatggtttattattccttaatcacttatgggtaatagtgttgtaatgaactaaaattttggttgatggaaatctcgaaagtctgattggt

SEQ ID NO: 5538 - DNA, 278 bp, Lilium asiatic
ggtggaaatggattatcttcaggacatgcaccaggtagttatcagagtttaccaggagcaggtgcacataatcccaatatggcagcttctcatgcatcggaagcgtcttcagataaacctgaatccagttcatcgttacctaatcctggagactgggatccctgctatagtgatgaacttctattgcaagaggaaaattctgaagtgcgacccctaatgtttggagcttttaacggtggccttagtagttcatcggatcctgcatttgtaactagtgc

SEQ ID NO: 5539 - DNA, 431 bp, Lilium asiatic
cccacgcgtccgcttttttgtctgtgacccggctcttaagaaggtgtttggtgaggagaaggtgaaattctcgctggtgtcacagaagatctcgcagcatttgtcggcacctcagccgattatactggagcacaagattaagctgacggggaatggtgcgattgggagtgcttgctatgatgtgctagttgatattcccttcccgcttcagaaggagatgtcggcttttcttgcaaatacggagaagcataaggaaattgaggtgtgcgatgaggtgatctctgcttcgattaagaagatacatgagcatcggaggagggcggcgttctttcttggtttagccagtctcccgttgagttcataaatgcgctgatttcgtcacagagcaaggatttgaagatggttgctggggaggcaagtcggaatgcgga

SEQ ID NO: 5540 - DNA, 416 bp, Lilium asiatic
tttttccgcggcagcaaatgctagtaataacatgggcttaaacaaagcttatttaggtattagggaagctgaagttaacacaggtactattgtgaaaaaattaagaccccgggctcgaggacgtagttatccgataaaaagacctacttgtcatataacaattatattgagggataaaactaaattatttaaagatgaattttaactttcgattcatctttcgaaaaatatatatggaaagataatctaatagaaaaatatgggacaaaaaataaatccacttggtttcagacttggtacaacccaaagtcatcattccttttggttcgcacaaccacaaaattattccgcgggtatacaggaagatgaaaaatacgggattgtatcaaggattatgtacaaaaaaataagagaac

SEQ ID NO: 5541 - DNA, 403 bp, Lilium asiatic
ccaatgacccagaagatgtgaaagccgctaagcgtaagaaaatacacgcattcaagtcaaaagtgcgctttgaacaactggaagtggtgcaaaataagcggcagaatgcttggcaacagttccaaacaacaaaagggaaaaccaagaaggtcgggttcttttcaggtcgcaagcgggagagcatattcaagtccccagtgacgccaaccttccctgtcggatcctctggggaggaggggggtcgagaagaactcgcctggcttttgaaaagggacgggacaagtgatcagaccattgcctttggaggttttccttataaccaaaactcttaccgccgagaggttggtttcaaactgtcttactaaatcctaaggttgaaattaaggcattgattatagcgatg

SEQ ID NO: 5542 - DNA, 277 bp, Lilium asiatic
aggactcgtggcggacgtttgggctttggttagggattcccctctcggggagcaggggatctctagaagtcgttcaccatgactaacttgtaacgtgttgtgttgaggtaggcattcattacagtacctgttgatgccatggaaaaaaattgcaagtgcacagaaactcttgagcttaagattgggttgaaaaattatgatccgggtaaggataagcagttcattggatctgtgaaattgtcccatattgcgaggcctaatatgacagtctgcatgc

SEQ ID NO: 5543 - DNA, 292 bp, Lilium asiatic
cccacgcgtccggaagaagccgaggggccgggcacacaagcggatgcagtacaatggccgcttcgtcaccgccgtcgtcggattcggcaagaagaggggccccaactcgtcggagaagtgaatgcatcgaatttccaatggtttgaatgctttacattttcgattactcttaggttggacttcaatgttttggttgtagtttcggagaatgttactgaatgttgaaagttgtctctttttggtatgaattggggttgatgattacattattatatgatgtcccgatttagtt

SEQ ID NO: 5544 - DNA, 416 bp, Lilium asiatic
gtccctgagtcggtaccttctgccactgttttcgcgaggcgggggctgtcgtatttgatgaatgggcaaccggagctcgctctccgggatgccatgcaagcccaggtatgcatgcccgagtggccgactgctttctacctgcaagctctcgccctatcaaaacttggaatggaaaccgatgcccaggatatgctcaacgacggggctgcctttgaagtgaagaagcagaacagttggcgtggctaaaattttaccagatttcagttactgtatgtctccccctggcgtagactcgggattcgaacatgatgcatcaggaattgcgttagtgttgaaagggtaatgtctcacatctggctgagatgggatcagccagtgcagtgtatagaacgctatactagaaataagtaggtact

SEQ ID NO: 5545 - DNA, 394 bp, Lilium asiatic
gggttttcttttttgaacccttggcggctttggccccggcggcggatttttgggggtgaaccggttcggccagccttcggatcttaagaaggacatggaccagaagcttcaaattaagctgaatgctaaccgggtgggtggtggaacactacgtgggtttgaccagttcatgaaccttgtgattgacaatacagtggaaatgaacggcaacgatcagaacgatattggaatggtggtcatcaggggaaatagcgttgtcatgattgaagccctcgagcctgttgctagaactcagtagtgttgcttctctcctttggttacttaatgcaagtagtgacaaacaagtttctgttacactcttaaatgtctgttttccaaatacatacctatcgtg

SEQ ID NO: 5546 - DNA, 395 bp, Lilium asiatic
gccgaagccgaagagcgctccggtcggcgtgtggcccaccgtcaagcccttcgtcggtggcggcaccgccggcatgctcgccacctgcgtcattcagccagtcgacatgatcaaggtgaggatccagcttgtggaaggatccgcggtgcaggtcaccaagaaaatgcttgcgcaggagggttttggatcgttctacaaggggctatcagctggtttactaaggcaagctacgtacacaactgcacgactaggatcgcttaggtctggacgaataaagcaatagaggctaatgatgggaaacccttacctctccttcagaaagcttttattgggctgacaagccggcgcaatttggctcctggttttggcaagtccaagctgatttggcacttcat

SEQ ID NO: 5547 - DNA, 390 bp, Lilium asiatic
cccacgcgtccggaaagaaagatgtttaggaagtgtttgctctcccttgtgctgggtcttgcactggctcaggcctgtgcaaggagccctccaggtcaagtcagtgtaagcacaaaccacactgacagctccgcttccggcgttggtgatcaaaagaactttttctatgctggaggcattggcggagattgctggcagaggtgttcccggactcggattttgcggaggtgttcccggcgatcgtacttgagtcagtgatgttggtggcttgggtgggctcggtggtggcattggaggaactaacggccttgttgctggtaccggcaactgtgcaagttgcggcttactcccttgagaagggtgttgggttaattttcgtgaggaacgcat

SEQ ID NO: 5548 - DNA, 250 bp, Lilium asiatic
cccacgcgtccgcggacgcgtgggcttacttgctttatctgtctgtttccagcttgattttgtagcgatataattggatcttagggttaattttgtttcgtgcttttattctgcgaagagttcatcgggattaaatgatcttttggatgttacaatgctttgaagtttacttcagattttaattttgctttgtgccttgttactctacttctttttatgtgtggaaagtaaattatgatctctattttgc

SEQ ID NO: 5549 - DNA, 292 bp, Lilium asiatic
tcgcggacgcgtgggcggacgcgtgggataaaaaaaaaaaaaaaaaaaagggaaaaagggaaaaaaaaaaaaaaaaaaaaaaaaaaaaaaaaaaaaaaaaaaaaaaagggtaggaaaaatgaagataaaaaaataaaaaaaaaaggtaaaacaaaaaaaaaagaatttagatatgatagaaaaaaaaaaaattttggggcgtcaatgtaaagagtgtcaaatgtaaaaaccggtgtgttaacgaacaaaatcgcgttgaaaaacaatcccttttattcaccggaggtaaaaa

SEQ ID NO: 5550 - DNA, 273 bp, Lilium asiatic
ctgagtttaaagacgagaataccaagctgatctcaaaactcgacagtggcatacatgcaatgaaggctcagcttgaagttgcaaaaaatgattttatcaaatactgcatcggggctcttatttcgatatccacggttactgttgtggtcctacgcagctgggtgtagggaacacatttacgctgaaccttgtacagacttattttttctttgcggtctggttaagatgccgctgacacttagtttggcactccaacttgcctgacgtcttcgg

SEQ ID NO: 5551 - DNA, 394 bp, Lilium asiatic
cccacgcgtccgcccacgcgtccgatttatggaaaaaattgagaaagatggattcattgatgtgaaggatggaacaggaaaagtcgtgtatcgactcacgaaagagagtttgatggagagactgagcactgatattcgctctgaatgtctttctattgccaaagagtgcaggtttttgatagtccatggtacagcagacgaagcgataccagtagaggatgcgtacgagttagcggagaacctacctaaccacaagatacacatcattcaaggtgccgaccattgctatactgcacaacaagacgagtgggtttcagctgtggtggacttcgtaaaatctgaacaggtgtgaggagacacagttgcagcatttggatttatggcgaagatatta

SEQ ID NO: 5552 - DNA, 373 bp, Lilium asiatic
aatagagcaaccttgagggagggagggagtgagacccatagagagaatttttttggagggaaaaaatggggagaaggaagagggagataaggcggattgaagacgccaacagccgtcaggtgactttctcgaagcgcggcagtggcctgctgaagaaggctttcgagctctctgtgctttgcgatgccgaggttgcgttgatcgtcttctctcccaagggcaagctctgtgagttctccagctccaggttaacgtggcatcggttccaatcaaggagtattctgcttggccgcctgcaatgcggactagctgattggaactctgcttataatgctgcaacttttagaataacttttcacagttatcccttttt

SEQ ID NO: 5553 - DNA, 356 bp, Lilium asiatic
acgcccacgcgttcggcaagagagaccatgagggttcaagcgttgctcgcgcgctcctcgcacacgctggttcgccgcctctgcagccctcctctttttcgccccacccgctgcttcgtctcatttcgcctgattgcgccgccgccgccgccttcgaagcttcactccttacccggtgctccggcccggcggccgttctgcgtgaggtcctcccaagtctccgatgctggctctatcgactcacccatgatgcagtccatggagaataacatcaaagagcaactaaatgcagatgtagtcagggtcacggatgcgtatggagatggtcgacatgtcagcattgttgtagtgtcatc

SEQ ID NO: 5554 - DNA, 329 bp, Lilium asiatic
gcgcctcaggggaggcatgcaaatctttgtgaagaccctcaccggcaagaccataactctggaggttgagagctctgatactattgacaatgtgaaggcaaagattcaggacaaggaggggattcccccggatcagcagaggctcatctttgctgggaagcagcttgaggatggccgcaccctggcggactataacatccagaaggagtctaccctccacttggtactccgcctcaggggaggcatgcaaatctttgttaagacgctcacaggtaagaccattaccctggaggtggagagctccgatacaattgataatgtgaaagcta

SEQ ID NO: 5555 - DNA, 365 bp, Lilium asiatic
gactgagccaaattcaatggcgactgcgaagctcccgctcctcctcctcgccttctccctggtcgccggcgtcgccgccgccgccgccgcggaggatgcgatcgctggcgagactcctctggcgaaggaagcggattcgcagcttcgagcggagctcgagcagctcacatcgaagatctccgccctagaatccagtatctcggatagaacccgggagctggaaggcaaggatggcaggattgcccaactggagaagactctattggagaaaacggcgagcattgtttctctgcaaggggaggttgagttgagtcagaaaaagggggcggtggatgctgagaagattatcgggaaggttcacaaac

SEQ ID NO: 5556 - DNA, 360 bp, Lilium asiatic
cccacgcgtccgctttcctcttatcttgtaagacaatgctgtatacgctcaggagaccccggcagaacttcgaagacttggttgctggacatttccgaatgcaagggcgggctatccttgtggcatgcaaagcttacatggatggtgctcaggttggatgtgtggtaggcgatggagtccaggatgtcgacgagggtgacaagagttgctcatccaatttcaagagctcgctgaaaaaactttttgaggacctattgatggagttcactgtcaaaggagccgactgcgatcagttccttgctcagaaagttaaagatggagcctcaaaagcagtagatactcgattgaagctatgagatc

SEQ ID NO: 5557 - DNA, 356 bp, Lilium asiatic
cccacgcgtccgcaaaaatcgttccttggagggccttcaagccaatattcaaaggctcaagggctacaaggccaagcttgtcatcttcccacgtcgctcgcacaagttgaaggctggtgattcttcaccagaggagctagcagctgcaacacaggtccagggcgcattcttgcccattgctcgtgagcagccaccggttgagattgtgaaggtgaccgatgagatgaaggctttcaaggcatatggcaagcttcgtgttgagcgaatgaatcagaagcagattggtgctaggatgaagaaggctgcggaggctgagaaagaagagaagaagtaatttggttctgagtcggtccttt

SEQ ID NO: 5558 - DNA, 312 bp, Lilium asiatic
gccacacattcactactgcttacatctgaagttctccgacgcttccccctcccgtcttctcgctccggcctgtgattcaatggctacagttgaggttcaatctgccacatctgtcgtgcctacaccagaggtccaacaagaagtcacaaaagatgtacaagccgaaaaagcaacggaagaaatatcagtagagaagccaaaggaggaagcaacaataacaatcgaagctccaactgaacaggtgaaagaaactgagatcaccaaagaggaagaagcaagtgaagtggtagaagttcaaggaactgagaccct

SEQ ID NO: 5559 - DNA, 363 bp, Lilium asiatic
gtcaagacctgggaggccgtccgcaccttttctgggactcattgcggcgtcatgcggtcaggtgggcgggttccttcagagttactgtcagctcggcaagcacatcgagatgaacgggccaagcattgacaagccgatcaagatgaacgggcctagcaacggtgcatcggtatcgaaaatccacaaaaatggaaactgcaaagttaatgagaaaaccaaagctgttttgtatggcaatggtgtgcacccttagaatcggaagttgtttcttgcccccttttcatggaagcttgttggtgtgcatagacagttgagtatggaaatgtttttgtagttgctgataagagactttgtaggatgttg

SEQ ID NO: 5560 - DNA, 319 bp, Lilium asiatic
  modified_base (5)..(5): a, c, g, t, unknown, or other
cgggncggccgcacgcgtacgcccctctacacctatactcttctctctccttcttagactctcatatttataacttctcttaagcgtcggtaccaaacaaggattaaggagttatatatctttgccttaagagattctagcaagacttataccggattaatccatcaagtgcttcgaggtaagttaccaccccgttagcttacaaagcaagtatacaagcatgttttattcatttctttactcctctacttctcttatttgtgaaaaaactttttcttaaaattatttcgttaaaatcgtattattttactaaaatgtt

SEQ ID NO: 5561 - DNA, 306 bp, Lilium asiatic
cccacgcgttcgcccacgcgtccgaggacgcgtgggcatacttgatgtgaagaaacgagaggaagcctggaagcaaggaataaatgcagatgatttgatctacaacagtcgtcttctacgataaataattatggggacacttctccggagcatttaagtttcgtactcgttgacgttgtgagttcaggcatgtcaacgaggagctgtattagactagctgtgtttgagtcaaggtgatttgtgtttgctcttgtactgggtgtgagagaagtatgtgagttgatgcttatataatggcactcaact

SEQ ID NO: 5562 - DNA, 178 bp, Lilium asiatic
  modified_base (109)..(109): a, c, g, t, unknown, or other
ctgtgttacttgtttcagtaatttattggggataattgctcggatcttgctagatctgtcgatgtttatgtaatttttgaaggaattacggagatatacagtccatgtnaaaaaaaaaaaaaaaaaaaaaaaaaaaaaaaaaaaaaaaaaaaaagtagaaaaaaaaaaaaaaaacaaa

SEQ ID NO: 5563 - DNA, 386 bp, Lilium asiatic
cgggcgaccacgcgtgcggcattctctaaaaagaaagagaggggcatgtcctctgtcctattggaggtgaagccatgggatgatgagactgacatgaagaacttggaagcagcactccgcaacattgaaatgcctggtctcttatggggtgcatcaaagcttgtagaagtaggttatggtattaagaagctgcacatcatgatgactattgtggatgaccttgtctccgtcgacactcttattgaagagcgtctcaccgttgagccttttaatgagtacattcagagttgtgatatcgctgcattcaacaagatctaaagcttgttttctgccgttaagaccaccttcttttacttattttctgaggataatgttaatcttttaac

SEQ ID NO: 5564 - DNA, 341 bp, Lilium asiatic
  modified_base (1)..(1): a, c, g, t, unknown, or other
ntaaaaaaaaaaaaaaaaaatttcacaatactataaaaaataaaaaacataggataatggggctgacatgaaaaacttggaaagcaacaaaccaaaacattgaaatgcctggtctcttatggcgtgcatcaaagcttgttgaattaggttatggtcttaagaagctgcacatcatgattactattgtggatgaccttgtctccgtcgacactcttattgaaaagcgtctcaccgttgagccttttaatgagtactttcagagttttgatatcgctgcattcaacaagatctaaaactttgtttcttgcctttaggaccaagttcttttacttattttctga

SEQ ID NO: 5565 - DNA, 314 bp, Lilium asiatic
ggctgatctacgaggagacccgcggggtgctgaagattttcttggagaacgtgatccgcggggccgtcacctacacggaacacgcccgccggaagacagtgaccgccatggacgtggtgtacgccctcaagcgccagggtcgcaccctctacggcttcggcggctgatctatctaggtttctgctggtcggatctcgttttctgttagcgttccgtttactttaacggcgtcttgttggatctcggattctgttaatgttccatttcctttaacggcgttaaatattattcttctctttgagaagcatagtttt

SEQ ID NO: 5566 - DNA, 292 bp, Lilium asiatic
cacatatacggtgctctgtgtttgaagttcttaactgcctcagccacacttacttatgagagacataaggtggcactgggcctctgaatagctttcctcaagtctaggcactcttataaactgaggctggttggtacgatatcgcatgcttcctgatttgagtgcgctgggtatagtgtctattacttttagtgcgtcgagtatagtgtctatttctgtatatacaactgcaagcattatctgatatgtgagatattattatcatttgctatgagagatattatttctgaac

SEQ ID NO: 5567 - DNA, 79 bp, Lilium asiatic
acgcccacgcgttcgcccacgcgtccgcccacgcgtccgcccacgcgtccgcccacgcgtccgctgaggagtatcgaat

SEQ ID NO: 5568 - DNA, 91 bp, Lilium asiatic
  modified_base (21)..(21): a, c, g, t, unknown, or other
ctttccatccaacctctcctntcaatgtatagtttcaaatataactttcactccaaccacttactctctttttcccattaatctataacat

SEQ ID NO: 5569 - DNA, 289 bp, Lilium asiatic
caaatatttggtactctgtttttgaagttcttaactgccccagccacacttacttctgagagacataagttggcactgtgcctctgaatagctttcctcaagtctaggcactcttataaactgaggctggttggtacgatatcgcatgcttcctgatttgagtgggctgggtatagtgtctatttcttttagtgggtcgggtatagtgtctatttctgtatatacaactgtaagttttatttgttatgtgagatattattattatttgttatgtgagatattatttctg

SEQ ID NO: 5570 - DNA, 371 bp, Lilium asiatic
ggtggttgctccatgatgacatttgacgtggggacaagccggagcatgaccaaatatgagagagtagcgggtgtggctgcttaatcttctcggggtgctagtagagtttcggatttggatgctcactaccatgatttgtttgagagttagtcccggaaaggaatcacaaaatctttcgtttttagagtggtgtgttgcgtcatcctttgaaggggggagttgagattggacccttcttaggggtggggtgtttcttatgtttaaaggatattctcagtttgagtatgagcctttggtcaagattgtcttttatgcgggtttgggttgttaagggtgtgtaagttatctcttaccattgcaagtttctccac

SEQ ID NO: 5571 - DNA, 366 bp, Lilium asiatic
cccacgcgtccgttttgctgagagaggatttcatgagggtcgttagaaatatgcaaccccggaaagtagcacaagaggtcaagatccttcatctaaagtcaccattgaatcgatgccaccattgaactgatgcttcgcaagctgaatgccataggcttcgtcactatgatgatcgtctcatccatatagaggagaatcttgtcgcgcggtgtggagcgaatgaagaatgagttatcccgagcactctccaagagccctatcccaacacagacctgcagaaaccctcaaaccatgcacgagggacttgcttgacaccaaaaacaacttgacgtatgcgacaaacatgctgagcgggagggcagtagc

SEQ ID NO: 5572 - DNA, 183 bp, Lilium asiatic
tgcggcttgaatctgattcctcgccttttttccactccaccgccccaatctggggttccgtttccccttctcgcaaaatccacaccgaattcgtctaccatggaggaaattttgattccttcatccaaacccttcttaaccttgaaaaaccaaatccggttggccgccaatttcgccggaaca

SEQ ID NO: 5573 - DNA, 320 bp, Lilium asiatic
cccacgcgtccgcccacgcgtccgatcagtatgggcggctagtgtcctcttgcacgtattggaagggatgttggagtccgtcgatgttctggcacttcttggtgtcaccaaggaaacagtcgaaggttgctatcagctcatcatggaaactcgaggtatgagtactactggcaataagcggaagcaattcccctctcatgaccaccattcatctcctccaagcccaaatggagtgctgaattcctgcttcagctacgacagtagctgtgactcgtgggcggcgacatggtcatcgtcggtgtcgtcgtcgcccgagccac

SEQ ID NO: 5574 - DNA, 371 bp, Lilium asiatic
atcagggacaaggctcaaggtcgtggatatccttcctactcggattcctataatgatgccccgccctctgaaggctatggacggtatggtggttatcagggtggtggcagcagttatggtggatattctggtcgttctggaagctctgggttatctggttcgaaccctgtttcccatggaaaacattatggttactaggatccccagtgattagggacagcagctgagatctttcaagtccggagcccagcctatgtgaagcctgaagcctaaaactgtagacctgatgaactggatccaagttttatatggcccaccttggaagcttaggaggagaccagcatgcaataatattatgtttttcctatgag

SEQ ID NO: 5575 - DNA, 272 bp, Lilium asiatic
acgctgagacaaatatactttcgagggagactcataatattcagcaggagtacttgaaacttaagtcaagggtggaagcattacaacgatctcaaaggaatctcctgggcgaagatttaagccccctcaataccaaggagcttgagcaactggagcgccaactagacacatctttgaagttaatccgatcaactcggacccagttcatgctggatcagctctcacatcttcaaagaagggaacaaatgctctgtgaggctaacaagagcctc

SEQ ID NO: 5576 - DNA, 233 bp, Lilium asiatic
  modified_base (31)..(31): a, c, g, t, unknown, or other
  modified_base (71)..(71): a, c, g, t, unknown, or other
  modified_base (77)..(77): a, c, g, t, unknown, or other
  modified_base (120)..(120): a, c, g, t, unknown, or other
tctgctttagttcttaacttcactccttatntagtagaaagtttatcattatatgcgacctcttcttttanaacctncatcataaacatcttcttatcccctttttgaaatttcttttancttaacttttatatactgtacctttaatttaatattttgctttaacttctcatttatcttttatcaaacttttatccttttatatttatatctttatataattattatctttt

SEQ ID NO: 5577 - DNA, 356 bp, Lilium asiatic
gagatatcatcagggatgttggaatgcatagaaaaattagtacctgatatcaagaatccaagataagatcaacaaggagctgatcttgtacaagaatgcttcaggagactttggaagacaaatagctgtcagaggaagagatacattgcctcccgccgaatggtggtccaattatggtggaagttgcccgaatctagctcggttggccatacgcattcttagtcagacttgtagtgcgaggactagcgagcaaaatcatattctttttgaaaaaattcactatcagagattgaataatttggaacgtcaacgactctacgacctcgtttatgtacaatataatttgcggttgcagc

SEQ ID NO: 5578 - DNA, 365 bp, Lilium asiatic
cggacgcgtgggcggacgcgtggggtttttgccattttcttctgattgcttgagagttggggagctggtcagtatgaaatggcgagttgaaagattgaaagatcttgaagactccttgtgtaaagatgaaattctgtatgcggtagatgcaaatcctgaaaactggatgattgcagggaggaagcgaggtcatgtatccatgccagcgaagcaaggctcaagaatagtgataactattacatgcgtgccgctagtatgtggatacgttcggccacccctacttggtctacctgatgttggagatgccaacataagctgcagtccagctggacctcacctggtttgtgtcctgcctccatctatca

SEQ ID NO: 5579 - DNA, 338 bp, Lilium asiatic
  modified_base (14)..(14): a, c, g, t, unknown, or other
acgaatcattcttnttgtattcaatcaacaactattattacttaagatcaactttctaatttcgcgccccgtgataaaattattaccaactacacccttttcgcctaaattcttaaagacaattcaatctttgttattcccaaacctataatttaaactagcaacacttttaaattccatttttttccttctcatccttcttcaatactatatattcacattttttcactttttaactaataaaatatttttacccttctgtatttataaaacttctattgtagaactcattctataaatcattctttttcttaataaactattctcctttttttttt

SEQ ID NO: 5580 - DNA, 371 bp, Lilium asiatic
cccacgcgtccgcggacgcgtgggttctcggcaagtttagtccggaaacattgagcttacgggtcacccggggattagctggctggtttgtgcaggttgcactactaaaagggctggtacattcaataggcagtggtgagaccccattgctcgacatcgtcgcatatggtggctacgcttttacgggactatccttgtccattcttgtgaggctcatctggagttactcatactacttcgtgatgccatggatgagcttctgtatgggcatgttcttggtgaagacgatgaagagggtgatcctctccgagaagaggagctacgagaagcactcgagtaggcagcactatctggtgctcttcatggggata

SEQ ID NO: 5581 - DNA, 250 bp, Lilium asiatic
ccgggccgaccgacgcgttcgcgttaaaccctactttattaaccccaggtatggcatccttccgtaggggctttcataccggggcttttggtagtgctaacaggactgcaagtcaattaataccctatctagctttaaagtcacctatggcttcatcccttgtattgctcgctactgcaacacattacttattgtttgagggcttgtacttagcgagccttcacttcctgcccctttctttaactttccc

SEQ ID NO: 5582 - DNA, 214 bp, Lilium asiatic
  modified_base (82)..(82): a, c, g, t, unknown, or other
tcctcctatttatttttaatatctaaccccttctttctgacctttcgatcaccttttcactccttccagttaatcaacacantcgataagactctccatctttctacaccttctcccatctctcttactacttcttttaatcacgttctaattaattacttttctttttttcaagttaccttatcgtactcaacatttcctaaaacttctatac

SEQ ID NO: 5583 - DNA, 351 bp, Lilium asiatic
cccacgcgtccggaactttttcttaaattccattataagcatctataatataaacctgctacaaaataccaaaatggcattataagtttatatgatatacattaagccaaaatgcatcttataaatcctctatttcataatatatgataaaaaaattagctaacgaccaccatataagatatttagtaaaaaaatataatcatattatattatgaatatatgaaggatacataccttagtgcccatcataaattgtgtaatatgtatcttacataatatgcttatcgtaagtgtccatcatatatttatttatgtctgacaataaaaatacaataaatataatatagagtt

SEQ ID NO: 5584 - DNA, 331 bp, Lilium asiatic
gtttgtatttgtttgttcttgttgtttttgaatgttcttagttctaatgaaattttgagttgggattttagaaaaaaaaaaaaaaaaaaaaaaaaaaaaaaaaaaaaaaaaaaaaaaaaaaaaaaaaaaaaaaaaaaaaaaaaaaaaaaaaaaaaaaaaaaaaaaaaaaaaaaaaaaaaaaaaaaaaaaaaaaaaaaaaaaaaaaaaaaaaaaaaaaaaaaaagggggggcccctttaaaaaaacaaaaattactgcccgggccaaacgaaattaaaattttttaaatgggcgcaaaaaaaaaaaatcaatggcccgatgttaacaacccc

SEQ ID NO: 5585 - DNA, 362 bp, Lilium asiatic
cacattaccatgttctctatgatgagaaccacttttctgccgacgctttacagatgctaacgaaataacctttgttacacctatgctcgctgtacccgatctgtttctgtagttcctcctgcatactatgctcatcttgctgccttccgtgctcgatattattctgatggtgattcggaccgtggttcttcgtctgctggaggagctgaaaggaccggtgtggcaagaaatagagatcaggctacagtggtgcgtccacttccaaggatcaaggacaatgtgaaggaagttatgttttattgctagaagtatctaggcgcattgggtacttgatatcagctactttggattattgccatact

SEQ ID NO: 5586 - DNA, 366 bp, Lilium asiatic
cccacgcgtccgattcccccatggtatttgcaagatctaaccccttctttctcaccggccgatcaccggtcgctccttccagttaatcaacacagccgagaagactctcgatctttctacaccttctcccatctctcttactacttcttttaatcaggttctaatgaattacttgtctttttttcaggttaccggagcgtactcgacgggtcctgaagcttctagagggcaggagagagaacaagaaggcatgggataatctcgaagggtcaagaagcatggatggaggagttcgacaactatttaaaggggtgaagtgcagatgtggaggggcaccttattctctcggttctctccactccggag

SEQ ID NO: 5587 - DNA, 342 bp, Lilium asiatic
cccacgcgtccgcatttttaacccaatgctagctgcagtattctcaggaaatagtgtggtggtaaaggtttcataacatgcaagttggtcaggatgtttttatttacgaattattcaagctgcccttgctgctgtgggagcccctgaaaatctgtttcagcatatcctcacaatcatgcacctagaccttgcctctctagatagcgtccgtcaattcctcaaccattgtccaccgtgcctaaaatcccgctcgatgtcattgtgtgcaacgcagcggtatactttccgactgctaacaaacccatctatactgcggatggtttcgaaatgagtgttggtgtc

SEQ ID NO: 5588 - DNA, 324 bp, Lilium asiatic
cccacgcgtccgcccacgcgtccgcatcagtaaggtgtataggctatttggtcgggaatagagaaagccagaaagagtccctcctgcttgccccttcaagcctgcaaccagtaagaacgaccaagttggggttgatgatcagttaaatccacatttgcggaaagaagctgctgatgaattgaagcaagaatgagccaaaatctttagggtgtaagaatgtcctctatgctctgtttattatggaacctgattgacttgaaactttacagagcgaggattgtgttgtaaacattatcaataagcaagtattttcaattgtgagtc

SEQ ID NO: 5589 - DNA, 371 bp, Lilium asiatic
cggacgcgtgggctacggccaacgcggtccaattggtagggtacattggaaacccaagagatacaactgatgtgagtgtgacaacttaagtcaatatcaactcatatttgagaaatcttcaacgaggtggagatttatggggggtgaaggtaaaaggtgattggcagtgagagcatgaggcaacaattaatgccaccgatatatgaagacgacaaagttactggaaatataaacttgcttagactcacgtagttgcttaaactcacttagtgaaagttgggacataacttatcaacaataaatactttcttagactcacttagtccgctcgagtccattctcgataaggtcacattagtcaatttacccac

SEQ ID NO: 5590 - DNA, 360 bp, Lilium asiatic
ctttggagaagttttccggggcatatggaatggtacagatgttgcgatcaaagttttcttagagcaagatctcacagcggagaatatggaagatttctgcaatgaaatatcgatattgagtcgtcttcgccatccaaatgttatattgttccttggtgcatgcgtaaggccccctcacttatcaatgattactgagtacatggaaatggggtctttgtattatttaatacatacaagtgggcagaagaagaagttaagttggcgtaggagactgaaaatgctccgtgatatctgcagggggttgatgtgtatacatcgaatgagaatagtccaccgtgatttgaaaagtgcaaactgtct

SEQ ID NO: 5591 - DNA, 368 bp, Lilium asiatic
cggacgcgtgggcggacgcgtggggttcaccagcctctaacccggtgatcaatacccaccgagcagagtcctatcttaccgttgatcaatacccgacattgccatcactggtgtctaattccaccaccaattaacaccatctactgccgatcaccatcaccagagtgtgatcaggtcttaattgatgatcaagacacagaagcgggatcggttgtcgaaagtaatactaacgaagatgttggcaaagagaaggtaaaagaagaaggatgagtatgtatggtatctggccatatcgaacggtcactttgtttctgctttctaactcagatttgatgagatttgccaccagaactgaaggtaagggatgg

SEQ ID NO: 5592 - DNA, 340 bp, Lilium asiatic
gcaattcggaagattttgtatgctgctgacccgaaagtgtctcctctgatggaagcccaagatatggtgagcagatcgtcaactgatggcgatactgaagctgaggcctgaataagtaggaacttgtgtttaggagtattggtcgatcctaggaatgacgaatttgagttgtcgcagagggccgtaactgcctactaagcttccttattttgtacagcacaaatatggattagatgccaccctaactctgttttggtctaattttctttgcaccaaaagtcagtgtatggattaatcgcgggtaactcgcatgctggggtaattaaaatgcttttcttgg

SEQ ID NO: 5593 - DNA, 367 bp, Lilium asiatic
  modified_base (357)..(357): a, c, g, t, unknown, or other
gcggtggcggcggaagctacggaggtgggggcggaagctacggcagcggtgggggtagctgtggaggtggcggcggtagctacggcggcggcggcggctacaacggtggcggaggatacaacggtggcggcagcggtggtcgcagtggcggtagaaacggtggaggtggtggtgggtacggaggtggcggcggtggtgggtacggtggcggcggcggcggtggatcttgctacagctgtggtgagcctggacacatggctcgggactgcccttctggcggtggtggcggcggcggtgggcgctatggaggaggcggtggcggaagctacggtggcggcggcggcggccgtggtgtcngcggcggcgg

SEQ ID NO: 5594 - DNA, 314 bp, Lilium asiatic
gaatgaatgagttgaccgatatagggctcagaagggcagcaaacatgcatttgaatggttggaaaggaaagttccagaagagaagtaatgatctggactacacaagtaagagaagtctgaatgatgtcgtgagtattgaagaagaaaacaaacgacaaagagttccagaagagacttctgctggtccaactagtatgcaggcatctgagaatcccggtatagaggatcacctcgcgaactgttctgctcaaccagataatgaagacgatgaaattgaaaagggccagttgatagaagatcccgatgatcgaaat

SEQ ID NO: 5595 - DNA, 370 bp, Lilium asiatic
  modified_base (321)..(321): a, c, g, t, unknown, or other
ctcaaaataggaacagtaaaaatccccaaattcgccgtcacacagagagcggacgatctcgaaaccctagaccgatctccggttcttgccgcgcctggcctgcaggtgatgtcgaccccggcgaggaagaggttgatgagggattttaagcggctgcagaatgatcctcctgccgggatcagcggagccccgcatgacagcaacatcatgttgtggaacgcggttatcttcgggcctgatgataccccttgggatggaggtacgtttaaattgacactccagttcatcgaggattatccgaataagccgccgactgtgcgncttgtttctcgaatgttccatccaaacatttatgcagatggaagcattt

SEQ ID NO: 5596 - DNA, 449 bp, Lilium asiatic
gctggtccaacgaccatcattactgaaattaatcaaaaaattggagctgctggtattgttagccaggaatgcaaagcagttgtggtagaatatggggaacaaatactggctttgttgttggcagagacacaaccatccaaaatttgctcccagattggtctatgtaccttcgatgggacccatggtgttagtactggcattgagagtgtggtcaatgacaagggtgaaggtgttgttgcacatgatgctatgtgcacagcctgtgagatggcagttgtctggatgcaaaatcagcttcgccggaatgagacacaggaccaaatacttaactatatcaatcagctttgtgagcgcttacctagtcctatgggagaatcagctgttgactgtgctagtcttgacaccatgcctaatgtctcattttcaattggtggcaaaacttttgagct

SEQ ID NO: 5597 - DNA, 255 bp, Lilium asiatic
gttggagttgtctttggatcttgtatcatcaatttgttttatactcggtagtataagaaacgtcgagtatgtgttaaatgtaagtctatatctgaacttgtattttttattgtggattgctttgtttggtttagaataagatgacggtggtgattttggacaaaacaaaaaaaaccaccacctgtagaaaacaaaaaaaaaactcctctctatacagtgcctattgagctaaaactttaataaaatgaccccttt

SEQ ID NO: 5598 - DNA, 360 bp, Lilium asiatic
cggacgcgtgggggcagattgattgaggctaaagctgttgtctttgaatgtggtccaaactgtggatgtgatcagagctgtgtcaatagaacatctcagaaaggattgatgttccatctggaggtatttcgcactccaacaaagggctgggctgttaggtcgtgggacaatattccttctggttccccaatatgcgaatacacaggaattctaaagaagactgatgagactgagaaacttaatgacaatagttatcttttcgatattgactgtctgcaaaccatgaaaggcctcgatggaagaacggtgcggcctggagatgtttctgtgctggacaactttgacgatacaatggctgat

SEQ ID NO: 5599 - DNA, 269 bp, Lilium asiatic
  modified_base (100)..(100): a, c, g, t, unknown, or other
gaggacggcaaggaggactgagagttggaagaaaaggatgtagcagaactaagtagttttgtagatagcgtctgaatttgcaagaaataaggtgatgtanggctctgctctgagtttgtgttcgaatggtagacttgttctgaatgttagacaataatgtgttgtgtggctgtagctctgaattatataaataaaagaaaggtttcctcccatatcagggaaaaaaaaaaataaaaaaaaaaaaaaataaaaaaacaattaatttaaaa

SEQ ID NO: 5600 - DNA, 365 bp, Lilium asiatic
ctagggtttccgccgtcactagagaggaagcagagctcgccgtcgccggtagaagaagtggtcttcgtcgccgccaccgccaccaaacaccatgggtcgtatgcatagtcgcggcaagggaatctcttcatcggcgctgccgtacaagcggacgccgcctagttggctgaagacctccactccggaagtcgaggactccatctgcaagttcgcgaagaaggggctcgctccgtctcagatcggcgtcatccttcgtgactcccacggcattgcacaggtgaagagcgtcacaggcagcaagattctgcgtatcctcaaggctcacgggctggcgccggagatcccggaggatttgtatcatctga

SEQ ID NO: 5601 - DNA, 366 bp, Lilium asiatic
cccacgcgtccgatgagatgtcgccacaatcgccgttggacgagccgaagaagcgacctggtggtggtccagagaagttacccaaagcgaagaagcctaagaaggttgctgccccgaaagacgaggcgacatggtcgccgacgaaggctgggaagaagaacgtgggactggttattaacgggattgacttggacatttcgaagatcgccacgccggtttgctcctgcacgggaacccctcagcagtgctatcggtggggtgttggggggtggcagtcggcgtgttgtaccaccaccatatcggagcatcccctcccgatgagcactaagcgacgtggcgcacggattgccgggaggaagatgagcc

SEQ ID NO: 5602 - DNA, 436 bp, Lilium asiatic
gagaaatgttttccaatttgatcccagtacagcacctcgatggttccatcctccaggacgacgtccgcgctaccggcctcgtcctcacggcggaccccaagccccgcctcagatggacggcggacctccacgagcgcttcgtggaggcggtcacccagcttggagggccagaaaaagcaacgccaaagactattatgcgacaaatgagtgtgaaggggctcacactttttcacttgaagagtcatctacagaaatacaaaatggggagactttcaggcaaagaaatggcccgagactctaaagatcctttctaccatttggaaacctcaaatgtaactgctatgtctcctagagtgcctcccgatgtgaatgaggggcgtgaagtcaaagaggcactgagagcacacatggaagtgcagcggagattgcatgaaca

SEQ ID NO: 5603 - DNA, 263 bp, Lilium asiatic
  modified_base (93)..(93): a, c, g, t, unknown, or other
aaaaaaaaaaaaaaaaaaacaattacaaatataaacctcctaaataaacacacaaaaaaaaggaaggagaaattcctgaggtcgaaaggctcnccatttcttcttactttactcggcttccttccccatactttgtaatcagctgccatctcttatgttgaaccaatatcaatgcactctccattctattaatatcagtcaaaacataaaaacattcatccttatcactactaacctcatggaaatcattcactttttttcca

SEQ ID NO: 5604 - DNA, 377 bp, Lilium asiatic
cggacgcgtgggcgctgctctctgctccctccttctctcacttcaccttttctccaccttggtctctcgctttctccccaacccccgaccatctccaccgtcgcgccagtggtccctcctcttggaccacccccagatgcggcagagaagatgcaagcgctcagcaccgtcgaacctgagatcaacgctcacgagctcctccttctctctctctatctcattgctttccttttggaaattaaatctcgagcttacatttgtctcccccctgcaggaattgcatgaaggacggtggagatttcacgcatgcgagcaaaagctatcaagcaaggaaggaaacgatcatgcacggagggccgagatctgaagaagatgct

SEQ ID NO: 5605 - DNA, 282 bp, Lilium asiatic
gttgatttgagtgaggcttggagctgaatcggagtaagtgcttccatgattttattgcagaggaatcgggtcgttcggttgatttgagtgaggcttggagctgaatcggagtaagtacttccatgattttattgcagatgaatcgggtcgttcggttgatttgagtgaggcttggagctgaatcggagtaaatacgaggcctgtggtatggttggatcatcctctgtggtcgatctgggcttggctttcgtcattacttacgtggatcagtggggatttgac

SEQ ID NO: 5606 - DNA, 370 bp, Lilium asiatic
cccacgcgtccggggaggtatcttgaggtggaatttctaaagtttattttgacgaaggctgccagactcaagcgggtggtgatttcatcctatgactcggatgctttgaaggttgtgaaagcaatactgccaagggctcctaatctggaaatagttaccgaacttgagaagtagacattggtatggatagcaaaaggagtagtctgctgatgtcatatttcgtaactttagacaatgtcattttctctgttcttcttagaatcattcatgttgtgtgattccatgaagcactttatgaactgggattgttggttaaagtgaacctttttatgtgttgctatgaaccatatgtcattggcactaaatcaca

SEQ ID NO: 5607 - DNA, 281 bp, Lilium asiatic
gctagaggaggccaggacagcagctccagttccgacgaagccatacaaggacgtcctcgtgggcggtggcgaagcctgaaggagggtgagtagttttcagtaggtttggtttgtatgtgatgatactggtattttgtagttgggtgaatctgtttcagataaatacccgccctgtgtgaaatttgctgtattagcgagtcaagagatattagaatgcctcttaatggtctttgaatatttttagtatatgtgatatgtagttgggtgaatctgtttcagac

SEQ ID NO: 5608 - DNA, 373 bp, Lilium asiatic
cccacgcgtccgcggacgcgtggtcggaaaagagattgagaagcagacccatggcatttatgctctgcagaatgtcttcatcaggaaagtcaaaattctgaaggcccctaagtttgatcttggaaagctgatggaggttcatgatcacactggtgaggatttgggtgtgaagatggataggcctgctgaggagcctgcagcagaggttgagactgagattgtcggtgcttaggcctcccatttttggtttactgttatctccagcaatttaattgcagcaggaacttgtagggctatatgtggtaacttaatttaaggtaagttgtctggtggtttcttgttcctcgctgtggggagaattttcttatatgca

SEQ ID NO: 5609 - DNA, 447 bp, Lilium asiatic
aaaaaccagtggacatgctcattcagtttggaaattcttgtgtatgatgctaggttcaagtggcttagaaaccttttaaacgaaagttgtagaggttgaatattcttctacaatggagcaggcagcagatggatgcttgtgcaaatgcactttgatatgtggggccgtgttgtaagttcaacagttccaaactccaaagcactgagaagtgaaactcttgaaatgattgggtttcaattgattttatggtttttctttgtttaaacaaggtattacagtggggtggggatgagcataaatagaccaatgttggatgtccagcctataaaagtactctgttttttttaatatcaactcgggtggtgaagagttcacaccaaaatagcttgattagtatgcttttcttctttcgtctgtgttagtattgcgtgtagctgagagttttag

SEQ ID NO: 5610 - DNA, 254 bp, Lilium asiatic
gggtgttcccctgaggggaaggcaaaaactatggcggtttccatgggttagggtagattacgttgagagagtgagattttgagagattgattgtaataagagagtgtgagattgagtgcttttagcttcgagttctagttctcatggtgatgtaatcttttcttcatttctgcatgatttgtaaggattctgaacttatctgatgtaatattttctctgtttcgaatgaatgtgaagcttttactctttcaaaa

SEQ ID NO: 5611 - DNA, 462 bp, Lilium asiatic
tgcaaacccaagcatttccagaatgcacccacattacctccgtgtgcgtgcacataaaatcagatgtgcccacaatcttggcaaatgcgtgcgcatcacaatctgcttccgtgtggtttatcgaaacggcctccaatcaacttcttttgagccacaaacctcacactcctctccccatgtctccaataacgagtaagctgcggccctgtcctctcaacaacatagttttccaacctcttcaacgacccaatctcagcggccgaattgaaagtatgaagccattgtatccaatttaacatcgtatcatcctcagcagctagttatgaattttgaaattcggaattagagtcgtggcttataaatcgaagtatagagtcgtggcttataaatcgaagtatgtgacggagttctaggaagctctaattctagatagtggaattgggtgaggatcatactgaatta

SEQ ID NO: 5612 - DNA, 200 bp, Lilium asiatic
  modified_base (5)..(5): a, c, g, t, unknown, or other
  modified_base (31)..(31): a, c, g, t, unknown, or other
  modified_base (37)..(39): a, c, g, t, unknown, or other
  modified_base (53)..(53): a, c, g, t, unknown, or other
  modified_base (56)..(56): a, c, g, t, unknown, or other
  modified_base (71)..(71): a, c, g, t, unknown, or other
  modified_base (73)..(74): a, c, g, t, unknown, or other
  modified_base (80)..(80): a, c, g, t, unknown, or other
  modified_base (90)..(91): a, c, g, t, unknown, or other
  modified_base (93)..(93): a, c, g, t, unknown, or other
  modified_base (95)..(96): a, c, g, t, unknown, or other
  modified_base (99)..(99): a, c, g, t, unknown, or other
  modified_base (122)..(122): a, c, g, t, unknown, or other
  modified_base (141)..(142): a, c, g, t, unknown, or other
  modified_base (146)..(146): a, c, g, t, unknown, or other
  modified_base (149)..(149): a, c, g, t, unknown, or other
  modified_base (156)..(156): a, c, g, t, unknown, or other
  modified_base (176)..(176): a, c, g, t, unknown, or other
gaaanggcaaagaggaaccgcacagggaganggaacnnnaccaaccccggggnggngagccacaacgaggncnnacaaangaacaaagannangnnganccaaacggggcggggaagaacancacccgggaggagcaagcnnaagngangggggcnccgaggagcaacaacgaacnggacaccaccaaaccgaagaccga

SEQ ID NO: 5613 - DNA, 329 bp, Lilium asiatic
  modified_base (3)..(5): a, c, g, t, unknown, or other
  modified_base (13)..(14): a, c, g, t, unknown, or other
  modified_base (23)..(24): a, c, g, t, unknown, or other
  modified_base (30)..(30): a, c, g, t, unknown, or other
  modified_base (32)..(32): a, c, g, t, unknown, or other
  modified_base (38)..(38): a, c, g, t, unknown, or other
  modified_base (58)..(58): a, c, g, t, unknown, or other
  modified_base (64)..(65): a, c, g, t, unknown, or other
  modified_base (69)..(69): a, c, g, t, unknown, or other
  modified_base (86)..(86): a, c, g, t, unknown, or other
  modified_base (89)..(89): a, c, g, t, unknown, or other
  modified_base (92)..(93): a, c, g, t, unknown, or other
  modified_base (95)..(95): a, c, g, t, unknown, or other
  modified_base (99)..(99): a, c, g, t, unknown, or other
  modified_base (108)..(108): a, c, g, t, unknown, or other
  modified_base (110)..(110): a, c, g, t, unknown, or other
  modified_base (118)..(119): a, c, g, t, unknown, or other
  modified_base (124)..(124): a, c, g, t, unknown, or other
  modified_base (132)..(132): a, c, g, t, unknown, or other
  modified_base (134)..(135): a, c, g, t, unknown, or other
  modified_base (138)..(138): a, c, g, t, unknown, or other
  modified_base (141)..(141): a, c, g, t, unknown, or other
  modified_base (145)..(146): a, c, g, t, unknown, or other
  modified_base (149)..(149): a, c, g, t, unknown, or other
  modified_base (156)..(156): a, c, g, t, unknown, or other
  modified_base (160)..(160): a, c, g, t, unknown, or other
  modified_base (164)..(164): a, c, g, t, unknown, or other
  modified_base (168)..(168): a, c, g, t, unknown, or other
  modified_base (176)..(176): a, c, g, t, unknown, or other
  modified_base (179)..(180): a, c, g, t, unknown, or other
  modified_base (188)..(188): a, c, g, t, unknown, or other
  modified_base (194)..(194): a, c, g, t, unknown, or other
  modified_base (196)..(196): a, c, g, t, unknown, or other
  modified_base (210)..(210): a, c, g, t, unknown, or other
  modified_base (213)..(213): a, c, g, t, unknown, or other
  modified_base (216)..(216): a, c, g, t, unknown, or other
  modified_base (220)..(220): a, c, g, t, unknown, or other
  modified_base (222)..(222): a, c, g, t, unknown, or other
  modified_base (235)..(235): a, c, g, t, unknown, or other
  modified_base (237)..(237): a, c, g, t, unknown, or other
  modified_base (239)..(239): a, c, g, t, unknown, or other
  modified_base (254)..(255): a, c, g, t, unknown, or other
  modified_base (258)..(258): a, c, g, t, unknown, or other
  modified_base (266)..(266): a, c, g, t, unknown, or other
  modified_base (270)..(270): a, c, g, t, unknown, or other
  modified_base (274)..(275): a, c, g, t, unknown, or other
  modified_base (279)..(279): a, c, g, t, unknown, or other
  modified_base (281)..(281): a, c, g, t, unknown, or other
  modified_base (311)..(311): a, c, g, t, unknown, or other
  modified_base (318)..(318): a, c, g, t, unknown, or other
ggnnnggagaccnnccccggcgnnaagcgnancaccancaagccccagacggaccgcnggggcnncccngacaccaacagcggaancancgnncnggcngagggacgncncaagaacnngggangcgccacngnncanccnagcnncgncagggcnggcncggncacnaaccaggnganngcccagcnggagcngnggaacgagaaggcnagnggnaagnangagaagaaggggnangngccgccgaagcaccnngangagaaggncgcngccnngcancncaacaagcccggagcgaaaccgacaaagcncaccccngagcaggccga

SEQ ID NO: 5614 - DNA, 448 bp, Lilium asiatic
acgcaaaagtataaagcacacataattgattacatataataataaatttttacctcataccattggtaatgttaccttattatccacgatgaaatcttctaaaattgattgttggatgcttctactctccaaaccttcaacatgatggtgctttctcaatgaaatattgagaagatatggacccaaacagtctactgtccctatatataacccttttcatagaaaacatgggacaataattataatatttgaaataagttgcttgttaaatctgttcaaacccacagtttgaaactaatagctttaatgcttcaaatgctgatatttctctctttatttaaaatatcagttaaacttatcttcgttaaaatcctttcaactatcccgttgcttcctaacatttaaacctatttaaaaaacatttaattttaaaaagaaaataattaaa

SEQ ID NO: 5615 - DNA, 222 bp, Lilium asiatic
  modified_base (12)..(13): a, c, g, t, unknown, or other
  modified_base (23)..(23): a, c, g, t, unknown, or other
  modified_base (68)..(68): a, c, g, t, unknown, or other
  modified_base (75)..(75): a, c, g, t, unknown, or other
  modified_base (80)..(80): a, c, g, t, unknown, or other
  modified_base (94)..(94): a, c, g, t, unknown, or other
  modified_base (99)..(99): a, c, g, t, unknown, or other
  modified_base (136)..(136): a, c, g, t, unknown, or other
  modified_base (184)..(184): a, c, g, t, unknown, or other
  modified_base (188)..(188): a, c, g, t, unknown, or other
  modified_base (200)..(200): a, c, g, t, unknown, or other
  modified_base (216)..(216): a, c, g, t, unknown, or other
ggggccgaggcnnccgaggccgnggcaaagggggcaacggagggcgccgcgaccaccaacgggaagcnggggaanacagngaagaagccccgangccanagcaaggccgaggccgcggccggggaagggggccaangccaggaacgggccgagggcccagagcgaacggaccgaacggaccganccangaaagagccggnggcgagcaaacggaangaagaa

SEQ ID NO: 5616 - DNA, 59 bp, Lilium asiatic
gatctgtaataggtatggtcaaagattctttaactttcatccacttcattcatataaat

SEQ ID NO: 5617 - DNA, 440 bp, Lilium asiatic
ctgacgcgtgggcggtaaggaggccggagatcggcacccgaaaattggagatggagtgctggtgggcgctgggactcagatattggggaatgtggtggtaggggctggggcgaaggttggggcgggatcggtggtgctgaatccggtgccaccgaggactacagcagtggggaatccggcgaggctcgttggtgggaaggagaatccggtgatgctggagaggatggcagggctgaccatggaccacacctcgtggtccgactatgttatctagagtagcacattttgttgttgtaagacttcatgcttgtgttgttcttgaatttgaagacgttatcttcatctttgaagctgagatagtgagctagtttttatgttcatactggttcacacatattgtgaataagcagagatctgaagttctctaaattaaatataaa

SEQ ID NO: 5618 - DNA, 450 bp, Lilium asiatic
gttctatcagtttattgtgatatggcttcttcagacagaagggaaaaggctgtttcagctcgaggaacctggtgctgatctcgctcttaatacacttatattcaactcattcgtcttttgtcaggtcttcaatgaaattagctccagagaaatggagaagataaacgttttccatggtatgctgcagaactatgttttcgtgtcagtcctcaccatcaccgtcatcttccaggtcatcataattgagttccttggcgaatttgcaaatacgacaccccttacattgtcacagtggtttgtgtgtgtattgatcggattcatcagcatgcccatcgctgctgccattaagttgattcctgtgggctcccagtaaaatctattttgcctcacagaatttgtttgttagacgcttccaagcactactgacttattgttggcccttttgtgatg

SEQ ID NO: 5619 - DNA, 187 bp, Lilium asiatic
gccacgcggccaaaagaggccagaggcaaaggaggcaacggaggaacccgcgaccaccaacgggaagcacgggaaaacagggaagaagccccgaagccaaaacaaggccgaggccgcggccgaggaagggggccaacgcggggaacgagccgaggccccagagcgaacggaccgaacggacccaacc

SEQ ID NO: 5620 - DNA, 291 bp, Lilium asiatic
  modified_base (14)..(14): a, c, g, t, unknown, or other
ctcacccaaagctngaatcatgtctgggcggggtaaaggtgggaaggggctcggcaagggtggcgccaagcgccaccgcaaagtgctgagggacaacattcagggcatcaccaagccggcgatcaggcggctggcacggcgcggtggcgtgaagaggatcagcggcctcatctacgaggagactagaggagtgctgaagatatttttggagaatgtgatccgtgatgctgtcacctacacagagcatgcacgccggaagacagtgacggcgatggatgttgtgtatgctct

SEQ ID NO: 5621 - DNA, 172 bp, Lilium asiatic
  modified_base (2)..(2): a, c, g, t, unknown, or other
  modified_base (6)..(6): a, c, g, t, unknown, or other
  modified_base (12)..(12): a, c, g, t, unknown, or other
  modified_base (16)..(16): a, c, g, t, unknown, or other
  modified_base (18)..(18): a, c, g, t, unknown, or other
  modified_base (29)..(29): a, c, g, t, unknown, or other
  modified_base (39)..(39): a, c, g, t, unknown, or other
  modified_base (42)..(42): a, c, g, t, unknown, or other
  modified_base (44)..(44): a, c, g, t, unknown, or other
  modified_base (66)..(66): a, c, g, t, unknown, or other
  modified_base (74)..(74): a, c, g, t, unknown, or other
  modified_base (88)..(88): a, c, g, t, unknown, or other
  modified_base (90)..(90): a, c, g, t, unknown, or other
  modified_base (117)..(118): a, c, g, t, unknown, or other
  modified_base (123)..(125): a, c, g, t, unknown, or other
  modified_base (127)..(129): a, c, g, t, unknown, or other
  modified_base (134)..(134): a, c, g, t, unknown, or other
  modified_base (142)..(143): a, c, g, t, unknown, or other
  modified_base (146)..(149): a, c, g, t, unknown, or other
  modified_base (156)..(156): a, c, g, t, unknown, or other
  modified_base (165)..(165): a, c, g, t, unknown, or other
gnggcngacaancacnancggccagaccnaacaaaggcngcncnggcaaggggaagcgcagggcancggagccncaagggggccaaancnggacccaagaaaaagaacaggcaggcnnaacgnnngnnnagggngggaaccnnggnnnnggcccgnagcgaaacngagaaaa

SEQ ID NO: 5622 - DNA, 116 bp, Lilium asiatic
  modified_base (1)..(3): a, c, g, t, unknown, or other
  modified_base (69)..(70): a, c, g, t, unknown, or other
nnngaaaaaaaaaaaaaaaaaaaaaaaaaaaaaaaaaaaaaaaaaaaaaaaggggaaaaaaggggaaannaaaaaaaaaaagaaggggaaaaaaaaaaaaaaaaaaaaaagaagaa

SEQ ID NO: 5623 - DNA, 127 bp, Lilium asiatic
  modified_base (35)..(36): a, c, g, t, unknown, or other
  modified_base (45)..(45): a, c, g, t, unknown, or other
  modified_base (51)..(51): a, c, g, t, unknown, or other
  modified_base (59)..(59): a, c, g, t, unknown, or other
  modified_base (77)..(77): a, c, g, t, unknown, or other
  modified_base (105)..(105): a, c, g, t, unknown, or other
  modified_base (107)..(107): a, c, g, t, unknown, or other
gcccacgcgccggaaaacagaagaagagacaaggnngagagacanaccccncgagaccnaccggaacaacgggcgcncgacggggcaggaagggcagccccgagngngccgaaagcacacaaaagga

SEQ ID NO: 5624 - DNA, 394 bp, Lilium asiatic
gtggtggtatctttggtatggaagttgcagaacacacgaagcagttatacaagattgatagagagggtgctaacctgaggtttgtttactggtgggaggacaaaacttaaggaaatcgtcagtgaagaaaactttaccagggtgctcgacggttccatgaattgatgggacaatatatgtgaagccttgtctcaattactgtgtggattgtgcttccgttttaataaagtcaaactcaaagtaccttgttccaagttttttcccagactcaaatttcagtgttctgcttgtgtttttgattgttacaattcagctgttgtattagaaattgctaagaattctcttggctgccatgattgtcagcgaatctccttggccatcagaaaaagatgtc

SEQ ID NO: 5625 - DNA, 434 bp, Lilium asiatic
  modified_base (417)..(417): a, c, g, t, unknown, or other
cccacgcgtccgttcaacaatggcgccgcctcagcccaagtccggcctcttcgtcggcatcggcaagggccatgtcgtcaccaagcgcgagctcgcccctcgcccctccagccggaaagggaaaaccagcaagagagtgcacttcgtgaagaacttgatcagggaggtggctggattcgcgccctatgagaagaggatcactgagctgctcaaggttgggaaggacaagagggcgttgaaggttgctaagaggaagttgggtactcacaagagggccaagaagaagagagaggagatggccaatgttttgaggaagatgagatctgctggagtttctgagaagaagaaatgatgaagttgcctatctttagtgaagagcattctggtttgagatttttgttataaaagaaacttcgntatttttcgtattttac

SEQ ID NO: 5626 - DNA, 226 bp, Lilium asiatic
  modified_base (13)..(13): a, c, g, t, unknown, or other
gcacatcctccgngtgctcaacaccaacgttgatgggaagcagaacatcatgttcgctctgacctccatcaagggtatcggccgccgatttgccaacatcgtctgcaagaaggctgatgttgacatgacaaagagggctggcgagatctcagctgcggagcttgagaatttgatgactattgtggcgaatcctcgtcagttcaagattccggattggtttttgaat

SEQ ID NO: 5627 - DNA, 251 bp, Lilium asiatic
  modified_base (3)..(5): a, c, g, t, unknown, or other
  modified_base (7)..(7): a, c, g, t, unknown, or other
  modified_base (15)..(16): a, c, g, t, unknown, or other
  modified_base (23)..(23): a, c, g, t, unknown, or other
  modified_base (27)..(27): a, c, g, t, unknown, or other
  modified_base (34)..(35): a, c, g, t, unknown, or other
  modified_base (58)..(59): a, c, g, t, unknown, or other
  modified_base (68)..(68): a, c, g, t, unknown, or other
  modified_base (91)..(91): a, c, g, t, unknown, or other
  modified_base (100)..(100): a, c, g, t, unknown, or other
  modified_base (104)..(104): a, c, g, t, unknown, or other
  modified_base (106)..(106): a, c, g, t, unknown, or other
  modified_base (108)..(108): a, c, g, t, unknown, or other
  modified_base (113)..(113): a, c, g, t, unknown, or other
  modified_base (117)..(117): a, c, g, t, unknown, or other
  modified_base (125)..(125): a, c, g, t, unknown, or other
  modified_base (178)..(178): a, c, g, t, unknown, or other
  modified_base (181)..(183): a, c, g, t, unknown, or other
  modified_base (193)..(193): a, c, g, t, unknown, or other
  modified_base (198)..(198): a, c, g, t, unknown, or other
  modified_base (203)..(204): a, c, g, t, unknown, or other
  modified_base (206)..(206): a, c, g, t, unknown, or other
  modified_base (214)..(214): a, c, g, t, unknown, or other
  modified_base (221)..(221): a, c, g, t, unknown, or other
  modified_base (225)..(225): a, c, g, t, unknown, or other
  modified_base (228)..(229): a, c, g, t, unknown, or other
  modified_base (232)..(232): a, c, g, t, unknown, or other
  modified_base (240)..(241): a, c, g, t, unknown, or other
cannncnagaccgcnngaagggnggangaggaanncccccaagacagccggggccaanncggcggggncaacgcagggggcggggaacaanagcacggcngacncngncagcngggncgaggccnccacaccggagacggcggcggcgacaagccacgaccaaggagaaaggaagccnagnnngggagccgancaagnacccnncnccaagcangagacanggcngcnngangaaagcgnnacacggggac

SEQ ID NO: 5628 - DNA, 93 bp, Lilium asiatic
  modified_base (32)..(33): a, c, g, t, unknown, or other
  modified_base (41)..(41): a, c, g, t, unknown, or other
gcgagggcgaggaggaacggcggggaacaagnnccgaacgncgccaggggggcgcgcaggggcgacagcgaacggcgccgacggcaccggggc

SEQ ID NO: 5629 - DNA, 226 bp, Lilium asiatic
  modified_base (10)..(10): a, c, g, t, unknown, or other
  modified_base (21)..(21): a, c, g, t, unknown, or other
  modified_base (33)..(33): a, c, g, t, unknown, or other
  modified_base (39)..(39): a, c, g, t, unknown, or other
  modified_base (43)..(43): a, c, g, t, unknown, or other
  modified_base (56)..(56): a, c, g, t, unknown, or other
  modified_base (61)..(61): a, c, g, t, unknown, or other
  modified_base (77)..(77): a, c, g, t, unknown, or other
  modified_base (80)..(81): a, c, g, t, unknown, or other
  modified_base (83)..(83): a, c, g, t, unknown, or other
  modified_base (107)..(107): a, c, g, t, unknown, or other
  modified_base (114)..(114): a, c, g, t, unknown, or other
  modified_base (119)..(119): a, c, g, t, unknown, or other
  modified_base (122)..(122): a, c, g, t, unknown, or other
  modified_base (129)..(129): a, c, g, t, unknown, or other
  modified_base (136)..(136): a, c, g, t, unknown, or other
  modified_base (140)..(140): a, c, g, t, unknown, or other
  modified_base (142)..(142): a, c, g, t, unknown, or other
  modified_base (148)..(148): a, c, g, t, unknown, or other
  modified_base (151)..(151): a, c, g, t, unknown, or other
  modified_base (185)..(185): a, c, g, t, unknown, or other
  modified_base (188)..(188): a, c, g, t, unknown, or other
  modified_base (206)..(206): a, c, g, t, unknown, or other
  modified_base (216)..(216): a, c, g, t, unknown, or other
  modified_base (220)..(220): a, c, g, t, unknown, or other
gacccagcgnccgcggagcgngggcggacgcgnggggcnccgncaaccggcggagnggacngagggaacacgggacnaanngnaggaaaggagaggaagaaggggangaaagangcagnagnaggcccnggggccnggcnanagcaanagngggagcggaagcgggggggggggaaggaaccganggnggggggaaccaaaacaanaagggggagnaganggagga

SEQ ID NO: 5630 - DNA, 106 bp, Lilium asiatic
tctttaattccgtcgacccagcgtcgtaaatgaattaccgacttgggtcgtcatatttaatagatataggaagcgtctaactaatacgatctgcaattattaaaac

SEQ ID NO: 5631 - DNA, 287 bp, Lilium asiatic
  modified_base (14)..(15): a, c, g, t, unknown, or other
  modified_base (17)..(17): a, c, g, t, unknown, or other
  modified_base (20)..(20): a, c, g, t, unknown, or other
  modified_base (36)..(36): a, c, g, t, unknown, or other
  modified_base (39)..(39): a, c, g, t, unknown, or other
  modified_base (44)..(44): a, c, g, t, unknown, or other
  modified_base (51)..(51): a, c, g, t, unknown, or other
  modified_base (54)..(54): a, c, g, t, unknown, or other
  modified_base (66)..(66): a, c, g, t, unknown, or other
  modified_base (74)..(74): a, c, g, t, unknown, or other
  modified_base (86)..(86): a, c, g, t, unknown, or other
  modified_base (92)..(92): a, c, g, t, unknown, or other
  modified_base (96)..(96): a, c, g, t, unknown, or other
  modified_base (98)..(99): a, c, g, t, unknown, or other
  modified_base (128)..(129): a, c, g, t, unknown, or other
  modified_base (134)..(134): a, c, g, t, unknown, or other
  modified_base (146)..(146): a, c, g, t, unknown, or other
  modified_base (167)..(168): a, c, g, t, unknown, or other
  modified_base (172)..(173): a, c, g, t, unknown, or other
  modified_base (179)..(180): a, c, g, t, unknown, or other
  modified_base (182)..(182): a, c, g, t, unknown, or other
  modified_base (191)..(191): a, c, g, t, unknown, or other
  modified_base (193)..(193): a, c, g, t, unknown, or other
  modified_base (201)..(202): a, c, g, t, unknown, or other
  modified_base (207)..(207): a, c, g, t, unknown, or other
  modified_base (218)..(218): a, c, g, t, unknown, or other
  modified_base (227)..(227): a, c, g, t, unknown, or other
  modified_base (231)..(231): a, c, g, t, unknown, or other
  modified_base (245)..(245): a, c, g, t, unknown, or other
  modified_base (247)..(249): a, c, g, t, unknown, or other
  modified_base (261)..(261): a, c, g, t, unknown, or other
  modified_base (275)..(275): a, c, g, t, unknown, or other
ggaaacaacaaagnncnganggcgactaacaggccnganactcnggacccngcnctactgggcccnggacgagnggaccgcaaagncgagcncggncnncccgaacaagaaagccggacacagaccgnnaaganacacacaaagangaggaaccgggaaagggacanncggnncgaacnncncgcccggcncngccccaannccacnggagccgacanaaggagcgngcgnacggaggccgggangnnngcaaacagagcncgaaggaagacggngaccgagaaaga

SEQ ID NO: 5632 - DNA, 346 bp, Lilium asiatic
caaaaccctaatcctcacctcagcttctcatcatctccgcacgatgccgccgaaggctgccggatcaaaggacgccgccccggagcgccccatcctcggtcgcttctcctcccacctcaagatcggaatcgtcgggctaccgaatgtcggcaaatcaacgcttttcaacacgctcacgaagctctcgattcccgccgagaacttcccgttctgcaccatcgagcccaacgaggctcggatcacggtccccgatgagcggttcgattggctctgccagctttacaagccgaaaagcgaggtagcggcatttctcgagatacatgatatagccggtcttgttcgaggg

SEQ ID NO: 5633 - DNA, 227 bp, Lilium asiatic
  modified_base (51)..(51): a, c, g, t, unknown, or other
  modified_base (104)..(104): a, c, g, t, unknown, or other
  modified_base (109)..(109): a, c, g, t, unknown, or other
  modified_base (121)..(121): a, c, g, t, unknown, or other
  modified_base (127)..(127): a, c, g, t, unknown, or other
  modified_base (139)..(139): a, c, g, t, unknown, or other
  modified_base (184)..(184): a, c, g, t, unknown, or other
  modified_base (194)..(194): a, c, g, t, unknown, or other
gacgcgccggcggaagagacggcataggagaagcaacagcaaaggcggcgnaagagacaggggagcaaccggagcaccaccgcgggcacaccaggggggaggcngaagnagcggcagaagngacganagccaaaaggcnagccggaaggcgagacccaaacgacgacgcggacgcccacgaggngcccccaaangaggagacggagccgagacccaaaccggcaccc

SEQ ID NO: 5634 - DNA, 265 bp, Lilium asiatic
  modified_base (6)..(6): a, c, g, t, unknown, or other
  modified_base (17)..(17): a, c, g, t, unknown, or other
  modified_base (19)..(22): a, c, g, t, unknown, or other
  modified_base (24)..(25): a, c, g, t, unknown, or other
  modified_base (27)..(28): a, c, g, t, unknown, or other
  modified_base (33)..(34): a, c, g, t, unknown, or other
  modified_base (42)..(42): a, c, g, t, unknown, or other
  modified_base (44)..(44): a, c, g, t, unknown, or other
  modified_base (54)..(56): a, c, g, t, unknown, or other
  modified_base (72)..(72): a, c, g, t, unknown, or other
  modified_base (78)..(78): a, c, g, t, unknown, or other
  modified_base (93)..(93): a, c, g, t, unknown, or other
  modified_base (97)..(97): a, c, g, t, unknown, or other
  modified_base (102)..(102): a, c, g, t, unknown, or other
  modified_base (108)..(108): a, c, g, t, unknown, or other
  modified_base (113)..(113): a, c, g, t, unknown, or other
  modified_base (118)..(118): a, c, g, t, unknown, or other
  modified_base (126)..(126): a, c, g, t, unknown, or other
  modified_base (130)..(130): a, c, g, t, unknown, or other
  modified_base (136)..(136): a, c, g, t, unknown, or other
  modified_base (138)..(139): a, c, g, t, unknown, or other
  modified_base (150)..(150): a, c, g, t, unknown, or other
  modified_base (168)..(168): a, c, g, t, unknown, or other
  modified_base (178)..(178): a, c, g, t, unknown, or other
  modified_base (181)..(181): a, c, g, t, unknown, or other
  modified_base (183)..(183): a, c, g, t, unknown, or other
  modified_base (190)..(190): a, c, g, t, unknown, or other
  modified_base (194)..(194): a, c, g, t, unknown, or other
  modified_base (198)..(198): a, c, g, t, unknown, or other
  modified_base (227)..(228): a, c, g, t, unknown, or other
  modified_base (243)..(243): a, c, g, t, unknown, or other
  modified_base (251)..(251): a, c, g, t, unknown, or other
gagaanagaaggcaacngnnnncnncnncgtcnnccaaggangngagcaacggnnncaggcggcaacgcccncgggcngcgaggcaggccccngacncaacngcaccnccggnaccangggcaaanagcnccacancnncggaggggggncccaggaagaaggcaaanggagacccancancncagcccnggcngcancagcagcagcaacagcagcagcagcaaanngggccggggcaaganacccacangcaaagcagagcag

SEQ ID NO: 5635 - DNA, 195 bp, Lilium asiatic
  modified_base (4)..(4): a, c, g, t, unknown, or other
  modified_base (43)..(44): a, c, g, t, unknown, or other
  modified_base (106)..(106): a, c, g, t, unknown, or other
  modified_base (111)..(111): a, c, g, t, unknown, or other
  modified_base (151)..(151): a, c, g, t, unknown, or other
  modified_base (170)..(170): a, c, g, t, unknown, or other
agcnggcaaaaaaaaaaaaaaaaaaagggaaaaaaaggaaaannaaaaaaaaaaaaaaaaaaaaaaaaaaaaaaaaaaaaaaaaaaaaaaaaaaaaaaaaaaaaanaacanaaaagagaaaaaaaggggaggagaagaagagaggaaaagngggggggggcaaaagagcnaaagaaaagacaaaacacaaggggg

SEQ ID NO: 5636 - DNA, 391 bp, Lilium asiatic
acgattcttttgaaatacatccatctcacgttgttaatgtcaagcaacgttgcttgccaaatgcgttaagctatcctatgctggaggagtatgacttcatgaattatacattaaaccctgacctgagtatggaattgaagcctcatgcacagcctataccatatcacgaaaagagtcttaataaaatgtttggtaatgggcgtgcgacatctgtcattattgtgcttacttgtggtgctgggaagtctctagtttgtgtatctgcagctctcacaattaaaaagagctgcctctgtttatctaccaaatcaatttctgtggatcagtgtgctttccaaatcaagctctgttctactataagagaccatcagacctgtcgctttacatttta

SEQ ID NO: 5637 - DNA, 137 bp, Lilium asiatic
aaaaaaaaaaaaaaaaaagacaacaaaaaaataaaaaaacaaacaaaaacacacaaacaaacggaaaaaaaggggcgggccgggcggcgcaacaaagcaaaccaacccccgcaggccaacaaaaagccgaccaaaaa

SEQ ID NO: 5638 - DNA, 317 bp, Lilium asiatic
  modified_base (2)..(2): a, c, g, t, unknown, or other
  modified_base (7)..(7): a, c, g, t, unknown, or other
  modified_base (30)..(33): a, c, g, t, unknown, or other
  modified_base (38)..(38): a, c, g, t, unknown, or other
  modified_base (77)..(77): a, c, g, t, unknown, or other
  modified_base (93)..(93): a, c, g, t, unknown, or other
  modified_base (109)..(110): a, c, g, t, unknown, or other
  modified_base (114)..(115): a, c, g, t, unknown, or other
  modified_base (132)..(132): a, c, g, t, unknown, or other
  modified_base (169)..(169): a, c, g, t, unknown, or other
  modified_base (173)..(173): a, c, g, t, unknown, or other
  modified_base (201)..(201): a, c, g, t, unknown, or other
  modified_base (205)..(205): a, c, g, t, unknown, or other
  modified_base (207)..(207): a, c, g, t, unknown, or other
  modified_base (210)..(210): a, c, g, t, unknown, or other
  modified_base (215)..(215): a, c, g, t, unknown, or other
  modified_base (226)..(226): a, c, g, t, unknown, or other
  modified_base (239)..(239): a, c, g, t, unknown, or other
  modified_base (275)..(275): a, c, g, t, unknown, or other
  modified_base (278)..(278): a, c, g, t, unknown, or other
  modified_base (290)..(291): a, c, g, t, unknown, or other
gncaagncccaaaacgagcgaaacccccgnnnnggggngccgagacaaggggccaaagagggaaggccaccggaggncgccgaggagcccagngagaaccccaccaccnnaacnnaggccagcacccaaccnacagcaagaagggagccggagcccaaacgcaagcacnaagncagccccaccccccccacacggagaccnaccnanagngacgncaaagccaggngcccggacgaggncgagggccccggcggcaagaaggcgagcccgccggnggncacaccgacgcnncaaaagggcggcgccaaggcgcaagg

SEQ ID NO: 5639 - DNA, 243 bp, Lilium asiatic
  modified_base (4)..(4): a, c, g, t, unknown, or other
  modified_base (11)..(11): a, c, g, t, unknown, or other
  modified_base (13)..(13): a, c, g, t, unknown, or other
  modified_base (16)..(17): a, c, g, t, unknown, or other
  modified_base (19)..(19): a, c, g, t, unknown, or other
  modified_base (32)..(32): a, c, g, t, unknown, or other
  modified_base (46)..(46): a, c, g, t, unknown, or other
  modified_base (59)..(59): a, c, g, t, unknown, or other
  modified_base (78)..(78): a, c, g, t, unknown, or other
  modified_base (92)..(93): a, c, g, t, unknown, or other
  modified_base (97)..(97): a, c, g, t, unknown, or other
  modified_base (99)..(99): a, c, g, t, unknown, or other
  modified_base (101)..(101): a, c, g, t, unknown, or other
  modified_base (104)..(104): a, c, g, t, unknown, or other
  modified_base (106)..(106): a, c, g, t, unknown, or other
  modified_base (114)..(115): a, c, g, t, unknown, or other
  modified_base (119)..(119): a, c, g, t, unknown, or other
  modified_base (121)..(121): a, c, g, t, unknown, or other
  modified_base (130)..(130): a, c, g, t, unknown, or other
  modified_base (132)..(133): a, c, g, t, unknown, or other
  modified_base (137)..(137): a, c, g, t, unknown, or other
  modified_base (139)..(139): a, c, g, t, unknown, or other
  modified_base (141)..(141): a, c, g, t, unknown, or other
  modified_base (146)..(146): a, c, g, t, unknown, or other
  modified_base (155)..(155): a, c, g, t, unknown, or other
  modified_base (161)..(161): a, c, g, t, unknown, or other
  modified_base (170)..(170): a, c, g, t, unknown, or other
  modified_base (172)..(173): a, c, g, t, unknown, or other
  modified_base (177)..(177): a, c, g, t, unknown, or other
  modified_base (179)..(179): a, c, g, t, unknown, or other
  modified_base (181)..(181): a, c, g, t, unknown, or other
  modified_base (186)..(186): a, c, g, t, unknown, or other
  modified_base (192)..(192): a, c, g, t, unknown, or other
  modified_base (194)..(195): a, c, g, t, unknown, or other
  modified_base (201)..(201): a, c, g, t, unknown, or other
  modified_base (205)..(205): a, c, g, t, unknown, or other
  modified_base (207)..(207): a, c, g, t, unknown, or other
  modified_base (211)..(211): a, c, g, t, unknown, or other
  modified_base (214)..(214): a, c, g, t, unknown, or other
  modified_base (218)..(218): a, c, g, t, unknown, or other
  modified_base (222)..(223): a, c, g, t, unknown, or other
  modified_base (234)..(234): a, c, g, t, unknown, or other
  modified_base (241)..(242): a, c, g, t, unknown, or other
gcancaacccngnccnncngccgaagaagacngggaaggagggggnggagcccaagagncggaagaaggcggccaagnccccaaagaaggcnnaaancngngcncngggaccgnnagcngnaggagaagncnnaaancngngcccngggaccganagcagnaggagaagncnnaaancngngcccnaagacngnnagccgnagananaagnggnggancagnngggcacgcgancggggcnnc

SEQ ID NO: 5640 - DNA, 460 bp, Lilium asiatic
acggcggctgctcctcacatgctggagcggaagtgggccttctggttcgataaccagtcggagcccgggcatggtgccgcctggggcagctccctccgcaaggcctacaccttcgacaccgtcgaggagttctggagcttgtatgaggtacttcgacctagcaagttcccggcaaatgctgatttccactgtttcaaagctgggatagaacccaagtgggaggatcctgaaaatgcaagtgggggaaagtggtctgttaccagtactggaaaggccaatcttgactccatgtggcttgagacgttaatggctttgattggagagcaatttgaagagagtgaggagatctgcggagttgttgcaaatgtccgccagagacaggacatgatcgcactttggacaaagagagcaagcaacgaagctgttcagactagtatcgggaagaaattgaaggacatca

SEQ ID NO: 5641 - DNA, 273 bp, Lilium asiatic
  modified_base (18)..(20): a, c, g, t, unknown, or other
  modified_base (25)..(25): a, c, g, t, unknown, or other
  modified_base (27)..(28): a, c, g, t, unknown, or other
  modified_base (34)..(34): a, c, g, t, unknown, or other
  modified_base (45)..(45): a, c, g, t, unknown, or other
  modified_base (47)..(48): a, c, g, t, unknown, or other
  modified_base (59)..(59): a, c, g, t, unknown, or other
  modified_base (66)..(66): a, c, g, t, unknown, or other
  modified_base (68)..(69): a, c, g, t, unknown, or other
  modified_base (88)..(88): a, c, g, t, unknown, or other
  modified_base (95)..(95): a, c, g, t, unknown, or other
  modified_base (97)..(97): a, c, g, t, unknown, or other
  modified_base (100)..(100): a, c, g, t, unknown, or other
  modified_base (102)..(102): a, c, g, t, unknown, or other
  modified_base (110)..(110): a, c, g, t, unknown, or other
  modified_base (112)..(113): a, c, g, t, unknown, or other
  modified_base (122)..(122): a, c, g, t, unknown, or other
  modified_base (124)..(124): a, c, g, t, unknown, or other
  modified_base (126)..(127): a, c, g, t, unknown, or other
  modified_base (131)..(131): a, c, g, t, unknown, or other
  modified_base (134)..(135): a, c, g, t, unknown, or other
  modified_base (140)..(140): a, c, g, t, unknown, or other
  modified_base (158)..(158): a, c, g, t, unknown, or other
  modified_base (170)..(170): a, c, g, t, unknown, or other
  modified_base (180)..(180): a, c, g, t, unknown, or other
  modified_base (183)..(183): a, c, g, t, unknown, or other
  modified_base (187)..(187): a, c, g, t, unknown, or other
  modified_base (199)..(199): a, c, g, t, unknown, or other
  modified_base (205)..(205): a, c, g, t, unknown, or other
  modified_base (207)..(208): a, c, g, t, unknown, or other
  modified_base (217)..(217): a, c, g, t, unknown, or other
  modified_base (219)..(219): a, c, g, t, unknown, or other
  modified_base (221)..(222): a, c, g, t, unknown, or other
  modified_base (226)..(226): a, c, g, t, unknown, or other
  modified_base (229)..(230): a, c, g, t, unknown, or other
  modified_base (235)..(235): a, c, g, t, unknown, or other
  modified_base (250)..(251): a, c, g, t, unknown, or other
  modified_base (253)..(253): a, c, g, t, unknown, or other
  modified_base (255)..(255): a, c, g, t, unknown, or other
  modified_base (259)..(259): a, c, g, t, unknown, or other
ggcaggaaaggaaaggcnnnaacanannaagggnacagcaaaagncnncaggcgccgangcggaanannggggggagcgggcagacangcggaangnagngncacagccncnngaagccaancngnngcgngannccagngaaaagggccaaccggancaaaaacgaacnggacaaaccngangagnagagaggcacancagccncnngaagccaancngnngcgngannccagngaaaagggccaacgnnancnaaancgaacgggacaaac

SEQ ID NO: 5642 - DNA, 468 bp, Lilium asiatic
  modified_base (68)..(69): a, c, g, t, unknown, or other
tccgggccgttcgtccgtctccgtctttgtccgtcgccctccggccgtcgtcttaatctctatatcanncaagaggaacccgagtgcctgtcttggatcgcggagtgacattcctggagttcatagctcgtacgatcggaagcattcttatccacaatgttgctaagttcaagtttgcgctgccgacgccggattctgtgctggggctcccgatcgggcagcacatcagctgcaggggaaaggatagcctcggcgatgaggtcatcaagccttatacgcctacgacgcttgattcggacattgggtactttgagttggttataaagatgtatccacaagggagaatgtcgcatcatttccgcgagatgcgagtgggtgactttctgtcagtgaaaggccccaaaggacgtttcacatatcaacctgtgcaagtcagagcatttggcatgatagctggaggatctggca

SEQ ID NO: 5643 - DNA, 448 bp, Lilium asiatic
gtggcttccgggaagccggaaagcttcagcgggtcatacctcgtgccaagctaccggggttggtcggtccttgaccctaagggcgaggggagggtctgccggttatgacaatgccgtggcactgcccgctggaggtagaggtgatgaggaggagctcgtgaaagagaatataaaggatgtgtcttcttcaactgggaagattactctcagtgtaaccaaaagtaagccagagactggagaagtgattggggtgtttgagagcattcagccctctgatactgatttgggttccaaagctccgaaggatgtgaagatccaggggatctggtatgctcagcttgaatagtagagagtggattcttcggtggatttagggctcttgttgcttcaaatgaatgtgttattaccatcttttattctctgttcgattgaaggtatatattgtgat

SEQ ID NO: 5644 - DNA, 339 bp, Lilium asiatic
ctcgcagccatgtcgctcgtcgccaacgaggatttccagcacatcctccgtgtgctcaacggcaacgttgatgggaagcagaacatcatgttcgctctcacctccatcaagggtatcggccgccgatttgccaacatcgtctgcaagaaggctgatgttgacatgacaaagagggctggcgagatctcagctgcggagcttgagaatttgatgactattgtggcgaatcctcgtcagttcaagattccggattggtttttgaatagaaagaaggattacaaggatggccgctactcgcaggttgtttctaatgcggtggatatgaagctgagggatgat

SEQ ID NO: 5645 - DNA, 288 bp, Lilium asiatic
  modified_base (16)..(16): a, c, g, t, unknown, or other
  modified_base (27)..(27): a, c, g, t, unknown, or other
ggagaacccaacgganaaaacaaacgngcatctaatctatgccaatgtcacagttgatgacgtccttctgggggaagagctggaaagccttactagtaaatatccagatcgcttcaaagtgtactatgtgttgaatcagccccctgagtcttggaatggtggcgttggctttgggtcaaaggaggtgattcaaaatcattgcccagcaccagcatctgacattcagattttgagatgtggtccacctccgatgaacaaggcgatagctacccaccttgaagctctgga

SEQ ID NO: 5646 - DNA, 307 bp, Lilium asiatic
  modified_base (79)..(79): a, c, g, t, unknown, or other
  modified_base (145)..(146): a, c, g, t, unknown, or other
  modified_base (193)..(194): a, c, g, t, unknown, or other
  modified_base (275)..(275): a, c, g, t, unknown, or other
aaaaaaaaaaaaaaaaaaaaaaaaaaaaaaaaaaaaaaaaaaaaaaaaaaaaaaaaaaaaagggaaaaaaagggaaaanaaaaaaaaaaaaaagggggaaaaaaaaaaaggaaccaaagaaaaaaaaagcgagcaagcagcaggnncgagggagagagagggaaaaagaaaagaaacgaaagaggagggagcnnaaaaacagaaaagaagggaaaaacccgggcgaaacaaaacaaaagggccggggagaaaaacccccgggggggagaaggcgnaaaagcgaaaaggcaaagacggaggggggggg

SEQ ID NO: 5647 - DNA, 315 bp, Lilium asiatic
  modified_base (7)..(8): a, c, g, t, unknown, or other
  modified_base (16)..(16): a, c, g, t, unknown, or other
  modified_base (18)..(20): a, c, g, t, unknown, or other
  modified_base (23)..(23): a, c, g, t, unknown, or other
  modified_base (31)..(31): a, c, g, t, unknown, or other
  modified_base (33)..(35): a, c, g, t, unknown, or other
  modified_base (48)..(50): a, c, g, t, unknown, or other
  modified_base (54)..(54): a, c, g, t, unknown, or other
  modified_base (56)..(56): a, c, g, t, unknown, or other
  modified_base (71)..(71): a, c, g, t, unknown, or other
  modified_base (88)..(89): a, c, g, t, unknown, or other
  modified_base (97)..(97): a, c, g, t, unknown, or other
  modified_base (100)..(101): a, c, g, t, unknown, or other
  modified_base (110)..(110): a, c, g, t, unknown, or other
  modified_base (115)..(115): a, c, g, t, unknown, or other
  modified_base (119)..(119): a, c, g, t, unknown, or other
  modified_base (123)..(123): a, c, g, t, unknown, or other
  modified_base (125)..(125): a, c, g, t, unknown, or other
  modified_base (127)..(127): a, c, g, t, unknown, or other
  modified_base (135)..(135): a, c, g, t, unknown, or other
  modified_base (141)..(141): a, c, g, t, unknown, or other
  modified_base (160)..(161): a, c, g, t, unknown, or other
  modified_base (167)..(167): a, c, g, t, unknown, or other
  modified_base (169)..(171): a, c, g, t, unknown, or other
  modified_base (173)..(173): a, c, g, t, unknown, or other
  modified_base (194)..(195): a, c, g, t, unknown, or other
  modified_base (198)..(198): a, c, g, t, unknown, or other
  modified_base (204)..(205): a, c, g, t, unknown, or other
  modified_base (212)..(212): a, c, g, t, unknown, or other
  modified_base (218)..(218): a, c, g, t, unknown, or other
  modified_base (227)..(227): a, c, g, t, unknown, or other
  modified_base (229)..(229): a, c, g, t, unknown, or other
  modified_base (232)..(234): a, c, g, t, unknown, or other
  modified_base (236)..(236): a, c, g, t, unknown, or other
  modified_base (247)..(247): a, c, g, t, unknown, or other
  modified_base (254)..(254): a, c, g, t, unknown, or other
  modified_base (256)..(256): a, c, g, t, unknown, or other
  modified_base (265)..(266): a, c, g, t, unknown, or other
  modified_base (268)..(269): a, c, g, t, unknown, or other
  modified_base (273)..(273): a, c, g, t, unknown, or other
  modified_base (275)..(275): a, c, g, t, unknown, or other
  modified_base (278)..(278): a, c, g, t, unknown, or other
  modified_base (281)..(281): a, c, g, t, unknown, or other
  modified_base (292)..(293): a, c, g, t, unknown, or other
  modified_base (310)..(310): a, c, g, t, unknown, or other
ggagccnnggaagcangnnngcnggaaaganannncgcaaggaacccnnnggcnanggccgggacaaccangagcaacgggggaaaanngccaaggngcnnggaacagangagcnaaanacanancnaaacaagnagcgcngggagccggacccacagcnngaggcncnnngnggaaggcacagccggaaaccnnggncaaagnnaaaaaangcgganaaccagcancnagnnncnccagaggcaanagaaaancnggacaagcnncnncganangancancaggaacgacnnaccgcacgagaagcaangacac

SEQ ID NO: 5648 - DNA, 122 bp, Lilium asiatic
  modified_base (6)..(6): a, c, g, t, unknown, or other
  modified_base (12)..(12): a, c, g, t, unknown, or other
  modified_base (27)..(27): a, c, g, t, unknown, or other
  modified_base (65)..(66): a, c, g, t, unknown, or other
  modified_base (75)..(76): a, c, g, t, unknown, or other
  modified_base (96)..(96): a, c, g, t, unknown, or other
  modified_base (98)..(98): a, c, g, t, unknown, or other
  modified_base (114)..(115): a, c, g, t, unknown, or other
cccggngaaaanagaagaggccgaagncaagcaaggggcggcgcgggagggggcaaggggagcanngacggagcnnccgagcggaggaaaggggancngaagacccaccgcaannacaagga

SEQ ID NO: 5649 - DNA, 442 bp, Lilium asiatic
gtggagcttgttctggatcataggcattccccttttctgaaggatactgtggatccctcggcgtcggataatctggaggccctccttcacctactcgatgggtaccatggcagaggaatgaggttcctgctggcgagcggcagggaccctgcactggtgaacaaggcgtgcgatttcctcaaggatcaccacatggtccctccccattggcgtcaagatgaaaataaaggaatgatcagatctggagatggacggtgggtgcaggccgagcggcccaaaattgatgatcatccgaacgatatacaccatcatcttcgtcagctcggcatagatcgcagttagctatatcttacagtataaaggagtaaatataatcggcactccatcactggactactggaaataatgcttatttattacctacctatgaaataatgctaat

SEQ ID NO: 5650 - DNA, 322 bp, Lilium asiatic
tcatgaccatctctaaccgaaatactctttacaattagttataaattctctaattaataaaactccataccctctacatttctacatactttattactaaccccaaaacccaaaaatgttaacttgataatccacttattttgatacatcataataaaatttcaatccttaatgcagtgattaacatgttagacttgcctatcaataatcaaatacctttactaattatttccgaaaatattcaaatcgaatcactcgcaattattattcttaataaacttcttgctttaatcaatatttttgccattaaaactcctttctt

SEQ ID NO: 5651 - DNA, 448 bp, Lilium asiatic
ggcacaaattgcgttgccccagatgcccggtcagtatcgagtcaagcataatatctccggcgacatgagctaaccaggtgaaaaggcaagctgagaattacatctccttgtattacaaaggcctgatgatgtgtgatgatgaggtttgcaagtatactacccggaatctgaatcttcgagtgataggtgattctgaaagaggaactatctgtcccaactatccccgctgcaatggacaccttataagacagtacactgaggcagatctatataagcagctttcatacttctgttatgtactggatgtttcaagatgtttctcaaagctggaacaaaaccagagattaattgtggagatagaccttgtgaaattaaaccaagtcgtcgattctgctgcttccattgtaaagatgatccgtgatcgatgcgccttcggtgggtacagatg

SEQ ID NO: 5652 - DNA, 402 bp, Lilium asiatic
  modified_base (344)..(344): a, c, g, t, unknown, or other
gcaatggctaagcttcccaccatcctgctgctcttgttccttgtcatggcctctgagatggggacgacgacggtggaggcgaggacatgcctgtcgcagagccacaagttcgaggggacctgtttgagggcggccaactgcgctagcgtctgccagacggagggattcaaaggaggggtttgcgagggcttccgccgccgttgcttctgcaaaaccgactgtcactgatgcctgagttcttggctttaataagtaatgttggattatctgagaagaataagatggacctggtaacgttggttttacagtctctccttcggtgtggggacttgttactttctccnaaggttctgttgtttgtgtctggggtgagctgaaagcctgtgttctgaagctggattt

SEQ ID NO: 5653 - DNA, 97 bp, Lilium asiatic
  modified_base (4)..(4): a, c, g, t, unknown, or other
  modified_base (6)..(6): a, c, g, t, unknown, or other
  modified_base (16)..(16): a, c, g, t, unknown, or other
  modified_base (30)..(30): a, c, g, t, unknown, or other
  modified_base (39)..(39): a, c, g, t, unknown, or other
  modified_base (46)..(46): a, c, g, t, unknown, or other
  modified_base (50)..(51): a, c, g, t, unknown, or other
  modified_base (65)..(65): a, c, g, t, unknown, or other
  modified_base (78)..(78): a, c, g, t, unknown, or other
  modified_base (82)..(82): a, c, g, t, unknown, or other
  modified_base (84)..(84): a, c, g, t, unknown, or other
gctncngaagaggaancacccacagaaganaaaaaaganagccacncggnngaagagggggagcncgagaagggagangccncngaacagggaaaga

SEQ ID NO: 5654 - DNA, 202 bp, Lilium asiatic
  modified_base (9)..(9): a, c, g, t, unknown, or other
  modified_base (19)..(19): a, c, g, t, unknown, or other
  modified_base (23)..(23): a, c, g, t, unknown, or other
  modified_base (41)..(42): a, c, g, t, unknown, or other
  modified_base (46)..(46): a, c, g, t, unknown, or other
  modified_base (64)..(64): a, c, g, t, unknown, or other
  modified_base (82)..(82): a, c, g, t, unknown, or other
  modified_base (87)..(87): a, c, g, t, unknown, or other
  modified_base (89)..(93): a, c, g, t, unknown, or other
  modified_base (95)..(95): a, c, g, t, unknown, or other
  modified_base (104)..(104): a, c, g, t, unknown, or other
  modified_base (115)..(115): a, c, g, t, unknown, or other
  modified_base (120)..(120): a, c, g, t, unknown, or other
  modified_base (126)..(128): a, c, g, t, unknown, or other
  modified_base (132)..(132): a, c, g, t, unknown, or other
  modified_base (142)..(142): a, c, g, t, unknown, or other
  modified_base (149)..(149): a, c, g, t, unknown, or other
  modified_base (153)..(153): a, c, g, t, unknown, or other
  modified_base (159)..(159): a, c, g, t, unknown, or other
  modified_base (173)..(173): a, c, g, t, unknown, or other
  modified_base (180)..(180): a, c, g, t, unknown, or other
  modified_base (182)..(183): a, c, g, t, unknown, or other
  modified_base (194)..(195): a, c, g, t, unknown, or other
cggacgcgngggaaaaaancccnaaaaaaaggggcgacggnncggnccgaggggcagcaaagcngagaccaagccgaacganggggncnnnnncnaggagaaancgaacccgaanggacncaacgnnnaaancgaaccgagncaaaaanaccnaaccangaaggaaccgaaancgaaaanannaaagaaaagannaaaaacc

SEQ ID NO: 5655 - DNA, 200 bp, Lilium asiatic
acgcttctgtttgtcaaattaataactctgttattcataattcgcttatcaacttcatttttaataataagttttacttcttaaaaaaaaaaaaaaaaaaaaaaactatttacaaaaaattaaaaattattaaaaaaaaaaaaaataaaaaaaaactacatttaataatactttatatactaaacccaaaaaccaaaaat

SEQ ID NO: 5656 - DNA, 453 bp, Lilium asiatic
cccacgcgtccggctgtatgcaactagtgtcaaagcccgaacagtttgatgtgatggttacggccaatctgtacgggaatctggtggcaaacactgctgcaggtatcgttggagggacaggagtcatgccaggaggaaatgccggtcaagatcatgcaatttttgagcaaggcgcttcggcaggcaatgtgggacacgaaaagctggtccaacagaagaaggcgaaccctgtagcgctgctgttgtcatctgccatgatgctgaggcatcttcagttcccatcatttgctgatcgattggaaactgctgtgaagcgggttattcttgaaggtaagtacaggaccaaagatcttggtgggcagagcacaacccatgaagttgtggatgcagtcatcgcagtgatggactgattgattatgcaagagaacgcccctttctatgagctttgatttc

SEQ ID NO: 5657 - DNA, 252 bp, Lilium asiatic
ggaattattggttcgaccgcacgcgtacgttctgtattgctttctgttgtgttcccggactcgtcttttgcggatgtgttcccttccttggtgcggtattcaatggtgttggtggcttcaatctctctgtggtggcattggaggaactagcgtccttatggctgttaccggcagtgttacacgtggcggataactcccttgagttggttattgcgttaccattcgggagtaactcacatcatgcattaagtt

SEQ ID NO: 5658 - DNA, 335 bp, Lilium asiatic
  modified_base (7)..(7): a, c, g, t, unknown, or other
  modified_base (25)..(25): a, c, g, t, unknown, or other
  modified_base (37)..(37): a, c, g, t, unknown, or other
  modified_base (48)..(49): a, c, g, t, unknown, or other
  modified_base (53)..(54): a, c, g, t, unknown, or other
  modified_base (288)..(288): a, c, g, t, unknown, or other
gaccggnggagctggggcctgcggngtgtgagccggntcgggcccggnngggnncgctgaggggtaatcccgggttttcggtgagggaggaagggggtgggctatgctttggatggatgggacgggtgctcaccgtcgcttccgcgtggcggtaggcgccgaaaccgaggtcgtatgggtcattgattagtttaattatttagggtccgtttgtttaccaactttctgttgggtaattaatgtggtggatattttatttgttttggttgtttaggaattatgttgcantgtataaacagaaatggaaagtatgttattacagactggttgtcaac

SEQ ID NO: 5659 - DNA, 219 bp, Lilium asiatic
  modified_base (5)..(5): a, c, g, t, unknown, or other
  modified_base (7)..(7): a, c, g, t, unknown, or other
  modified_base (9)..(9): a, c, g, t, unknown, or other
  modified_base (21)..(21): a, c, g, t, unknown, or other
  modified_base (23)..(23): a, c, g, t, unknown, or other
  modified_base (25)..(25): a, c, g, t, unknown, or other
  modified_base (56)..(56): a, c, g, t, unknown, or other
  modified_base (68)..(68): a, c, g, t, unknown, or other
  modified_base (90)..(90): a, c, g, t, unknown, or other
  modified_base (97)..(98): a, c, g, t, unknown, or other
  modified_base (105)..(105): a, c, g, t, unknown, or other
  modified_base (121)..(121): a, c, g, t, unknown, or other
  modified_base (152)..(152): a, c, g, t, unknown, or other
  modified_base (154)..(154): a, c, g, t, unknown, or other
  modified_base (175)..(175): a, c, g, t, unknown, or other
  modified_base (201)..(201): a, c, g, t, unknown, or other
cccancncncacgccaagccncncngaagaggccagcaagccagccaggggggcgnccccgcacagcncagacgccgccggcgccaccgncaacccnnggagcancaagagggagaagganagggcccccgacaaagcggaggcggcggccncnaggcgggccagcgacgacaangaggacggcggcgccaggaagaagcncaggccaaccaaggacca

SEQ ID NO: 5660 - DNA, 269 bp, Lilium asiatic
  modified_base (2)..(2): a, c, g, t, unknown, or other
  modified_base (6)..(6): a, c, g, t, unknown, or other
  modified_base (8)..(8): a, c, g, t, unknown, or other
  modified_base (15)..(15): a, c, g, t, unknown, or other
  modified_base (27)..(28): a, c, g, t, unknown, or other
  modified_base (36)..(36): a, c, g, t, unknown, or other
  modified_base (40)..(40): a, c, g, t, unknown, or other
  modified_base (43)..(43): a, c, g, t, unknown, or other
  modified_base (99)..(99): a, c, g, t, unknown, or other
  modified_base (113)..(113): a, c, g, t, unknown, or other
  modified_base (118)..(118): a, c, g, t, unknown, or other
  modified_base (130)..(130): a, c, g, t, unknown, or other
  modified_base (133)..(133): a, c, g, t, unknown, or other
  modified_base (137)..(137): a, c, g, t, unknown, or other
  modified_base (142)..(142): a, c, g, t, unknown, or other
  modified_base (147)..(148): a, c, g, t, unknown, or other
  modified_base (150)..(151): a, c, g, t, unknown, or other
  modified_base (170)..(171): a, c, g, t, unknown, or other
  modified_base (183)..(183): a, c, g, t, unknown, or other
  modified_base (191)..(192): a, c, g, t, unknown, or other
  modified_base (195)..(195): a, c, g, t, unknown, or other
  modified_base (198)..(198): a, c, g, t, unknown, or other
  modified_base (219)..(219): a, c, g, t, unknown, or other
  modified_base (227)..(227): a, c, g, t, unknown, or other
  modified_base (229)..(229): a, c, g, t, unknown, or other
  modified_base (237)..(237): a, c, g, t, unknown, or other
  modified_base (258)..(258): a, c, g, t, unknown, or other
  modified_base (260)..(260): a, c, g, t, unknown, or other
cnccangncgaggcngcacgccgcccnncgacgccnccangcngcagcgcaggcgccaccgggccgcacgagaggcgcgcgccaccccccaacagcggnaaagggagaaccgnccgangggaggacgcanaanccancagcngaacnncnncggagaacaggcccgccannaacagcaagaanagaaccannggnggngagaaggggacaaacgggcgncgacacgncnggaaacgncagcagaaccaaaaggaaacnanggaggcaag

SEQ ID NO: 5661 - DNA, 183 bp, Lilium asiatic
  modified_base (17)..(17): a, c, g, t, unknown, or other
  modified_base (22)..(24): a, c, g, t, unknown, or other
  modified_base (32)..(32): a, c, g, t, unknown, or other
  modified_base (43)..(43): a, c, g, t, unknown, or other
  modified_base (70)..(70): a, c, g, t, unknown, or other
  modified_base (84)..(84): a, c, g, t, unknown, or other
  modified_base (92)..(92): a, c, g, t, unknown, or other
  modified_base (95)..(95): a, c, g, t, unknown, or other
  modified_base (111)..(111): a, c, g, t, unknown, or other
  modified_base (113)..(113): a, c, g, t, unknown, or other
  modified_base (117)..(118): a, c, g, t, unknown, or other
  modified_base (123)..(123): a, c, g, t, unknown, or other
  modified_base (126)..(126): a, c, g, t, unknown, or other
  modified_base (139)..(140): a, c, g, t, unknown, or other
  modified_base (143)..(143): a, c, g, t, unknown, or other
  modified_base (147)..(147): a, c, g, t, unknown, or other
  modified_base (161)..(161): a, c, g, t, unknown, or other
  modified_base (165)..(165): a, c, g, t, unknown, or other
ccggagacgaaagggcncagcnnngaacaggnggagaggacgnggaagcagagggccccggggagggccnaagaaaagagcaancagggcangcncggcagccagcaaaancngggnnggggnganagccagcaaaacnngcncagnaacccgcaaaggcngggngaggaaggggagacagga

SEQ ID NO: 5662 - DNA, 265 bp, Lilium asiatic
  modified_base (2)..(3): a, c, g, t, unknown, or other
  modified_base (6)..(6): a, c, g, t, unknown, or other
  modified_base (12)..(13): a, c, g, t, unknown, or other
  modified_base (15)..(15): a, c, g, t, unknown, or other
  modified_base (25)..(25): a, c, g, t, unknown, or other
  modified_base (29)..(29): a, c, g, t, unknown, or other
  modified_base (33)..(34): a, c, g, t, unknown, or other
  modified_base (41)..(43): a, c, g, t, unknown, or other
  modified_base (47)..(47): a, c, g, t, unknown, or other
  modified_base (49)..(49): a, c, g, t, unknown, or other
  modified_base (55)..(55): a, c, g, t, unknown, or other
  modified_base (65)..(65): a, c, g, t, unknown, or other
  modified_base (67)..(67): a, c, g, t, unknown, or other
  modified_base (70)..(70): a, c, g, t, unknown, or other
  modified_base (76)..(76): a, c, g, t, unknown, or other
  modified_base (81)..(81): a, c, g, t, unknown, or other
  modified_base (91)..(91): a, c, g, t, unknown, or other
  modified_base (97)..(97): a, c, g, t, unknown, or other
  modified_base (99)..(99): a, c, g, t, unknown, or other
  modified_base (107)..(107): a, c, g, t, unknown, or other
  modified_base (109)..(109): a, c, g, t, unknown, or other
  modified_base (112)..(112): a, c, g, t, unknown, or other
  modified_base (114)..(115): a, c, g, t, unknown, or other
  modified_base (117)..(117): a, c, g, t, unknown, or other
  modified_base (128)..(130): a, c, g, t, unknown, or other
  modified_base (133)..(133): a, c, g, t, unknown, or other
  modified_base (135)..(136): a, c, g, t, unknown, or other
  modified_base (138)..(138): a, c, g, t, unknown, or other
  modified_base (150)..(151): a, c, g, t, unknown, or other
  modified_base (158)..(158): a, c, g, t, unknown, or other
  modified_base (163)..(163): a, c, g, t, unknown, or other
  modified_base (170)..(171): a, c, g, t, unknown, or other
  modified_base (174)..(174): a, c, g, t, unknown, or other
  modified_base (178)..(179): a, c, g, t, unknown, or other
  modified_base (184)..(184): a, c, g, t, unknown, or other
  modified_base (188)..(190): a, c, g, t, unknown, or other
  modified_base (193)..(194): a, c, g, t, unknown, or other
  modified_base (198)..(198): a, c, g, t, unknown, or other
  modified_base (201)..(201): a, c, g, t, unknown, or other
  modified_base (204)..(204): a, c, g, t, unknown, or other
  modified_base (212)..(212): a, c, g, t, unknown, or other
  modified_base (214)..(214): a, c, g, t, unknown, or other
  modified_base (222)..(222): a, c, g, t, unknown, or other
  modified_base (232)..(232): a, c, g, t, unknown, or other
  modified_base (253)..(253): a, c, g, t, unknown, or other
  modified_base (255)..(256): a, c, g, t, unknown, or other
  modified_base (259)..(259): a, c, g, t, unknown, or other
gnnccncccggnnangcaaaagcangganacannggggagnnngaananggggangaccacggancnggnaagagnggcgnggaacccaanggacgncngaacaaangnggngnnancagcccccgcnnngangnngnggggaaggaaanngagccanggacngcaaganngcncccnncccgncagnnnggnnacancgngcngaccacancngcggggancaaggaccangaagaagccagaaggaaaaangnnggngggaaa

SEQ ID NO: 5663 - DNA, 432 bp, Lilium asiatic
gcatgttccgttgtgttgcaaggtacgggtacaaggacctccatcggaaggatgacgacttggaggcaatgctgcttgacagtctgattctgttcgtccggctcgagactatgatggaaggatactccgactcagaggactacgcctccagtgaacgtatcgggcatcaaatggagaccgatacgcagaattcggccaattttctgcttaatgaaaatggcaccacagcatcctcgaacatgtcctcttcgagagacgccattgttcctgttctgtcaccgttccgcgggaacagtctgttgaggtcatcggcgaatacggtgatgcagtcggctggtgatgagctttgacttttgaatcagtcgagggatgctggggtggttcatattctggggaacacgatcgtgagggcgcgaaggagtcgtggcttgt

SEQ ID NO: 5664 - DNA, 440 bp, Lilium asiatic
ctcacactcgctcgccgtctccaagggtcacctgagatcacattagcaaatggggaaggctggtgctgtgctcaccagcggcgagggtgtggctggcactgtgtcctttgtccaagaaggcgatggtccgacgacggtgaatgggactctgtctgggctgaagcccggaccccatggttttcatgttcacgccctgggggataccaccaacggctgcatgtctactgggccacacttcaatcctgctggaaaagtgcatggagcccccgaggatgagaaccgtcatgctggcgaccttggaaatgtgactgtcggtgaagatggtaaagttacctttaccattgttgacagccagattccactctctggacctaattccattattggaagagctgttgttgtccatgccgatcctgatcgatcttgaaagggtggacatg

SEQ ID NO: 5665 - DNA, 325 bp, Lilium asiatic
gccggagagtatgaaggagggcagcgggttcatggtgaagtccgtgaatgtgaggggggaggctgatgaaaccggacaggtttagacaggtatgattagagtccatgctggtttggttttgattaggttcctagtggttgcatagttaaatgggactgttttgttggttggttgttattttgattttgtccagcagtggggatcaggcaatcgaatacaaagatccctactgatattggatgcaagcgatagcatgcatgtgaaccacttgttatccaacacgagttgtaatttttgtggtgttatatcaatattatgttgatat

SEQ ID NO: 5666 - DNA, 449 bp, Lilium asiatic
cccacgcgtccgcgttcagtggtgcctcgatgaacccggccatcgcttttggcccgggattggttagctggagctgggcgagccactgggtgtactgggctggtccgctcatcggtggtggccttgctgggatagtctatgaggtcttcttcattgatcatcattcgcatgagccgctcccctccgccgactattgaacgaatcgagatctttgagtttggagtttgaatttcgctatgatctttgttttgttatttgctttgaagttgtttcatcgtcctgcgtttgtttggagaatttgtgagaggagtagatgtgttctctcagtgtataatgttgagcattcacggtggtgaagaagatgatgcagtgatgttgctcttgtttttctatttttggcttggggtttggtatgaattttgggggtaaaatggtcatttgtgggtcgt

SEQ ID NO: 5667 - DNA, 442 bp, Lilium asiatic
cccacgcgtccgaatttatgaaggtgaagctgctgttgcagaagttgaagagaatgggaaagggaacgcttcctcaaaaccatccaagaagcctgctcccaagtctcctgcgaattcaaataaaaggaagaaggattcctctgaatctgaaggttctgaaagtgaggctgaggaagatgactctagtgacgagagtgatggaaagaagcctaaacggggtgggaagtctgctggtagaggccgaggccggggtgccaaaaaggggaacgacagcacgcccaaacgcggaaagggtcgtcctaaggcttctgagaaagaagctagttccgggcgtggccgtggtcgtgggagttccgggaaaacggcgacgtctcgcaaatgagtgttcctcttatcttgggttggtttggtccggattaggagtgtagcttgagtatatcta

SEQ ID NO: 5668 - DNA, 458 bp, Lilium asiatic
gcggagcaataaaagacaattctggcaattcagaccacgtaattattcttgttgctaattgtcggaggacctggttctggaccgacaaatggttcctcaattaggccctgaaagggaaatttcctcacatctatatacagtcgtaaaaaatatagaaggacgggtaactgaattcagaaacaggagtattggcacagattcctggaacctccacttaaggagataattgattgatagggaaactgatcaaatcagtgagcttatgcggcttttataatcattcagagcaaaatcaggagatgccctactagaggatatctagcaaggatggtctgttctcagtaattttttttaattgcttcctactggagaaaagaagcagttgcagaaatcatagaagtacgtataaaatgaaaaatatctgggtgccaaggtctgcttcctaatatgggaaaact

SEQ ID NO: 5669 - DNA, 386 bp, Lilium asiatic
  modified_base (320)..(320): a, c, g, t, unknown, or other
agaagaacaggatcatacctcggcatattcagctggcggtgaggaatgatgaggagcttgggcggctgctgcttggggtcaccattgctcatggtggtgtggtgccaaatattcattctgtgttgctgcccaagaagcaccaggacaagtctaagaagggggacgataagaatactgcttctcaggaattctagtttttctagagttattttagtatgtgtgaggatgaggatgaggatgtatcttgtgtttggtagagtatgcttactttaaggttggagcaccatggaacaaagtggacttctcgttcaatgtttggngaaaaaaaaatttctcaaaaatacatttaaatcgtttaataatgtacccttgtttaaaaagcaaaa

SEQ ID NO: 5670 - DNA, 439 bp, Lilium asiatic
cccacgcgtccgtgcatgcacgaaggcggagatggagggctctgatgatgggaaggtacggggagcagaggatcaagcagaggagatgcacatgcagacggaccggatcgagaaccaggagatcaagcaccgatgattgatggctctgatgaagtgaagttctgatcagacggcgaagagtgaggccgtgcatgaagactctagaagcttgtgtgagaggagatcaccattggttgtgcatgcatggtgctcggagaagaagggatgccaggcagaagacgagatctataaagccctaaggacgagcgatgaagttccccaagtctcagacgaagaaattcactcgttctctgagcctccttcatccaggaactctgcttagtgacagagtcgagttcggggaaggagtacgtagtagtcgtattctgttagataatat

SEQ ID NO: 5671 - DNA, 431 bp, Lilium asiatic
cggacgcgtgggaataaaacttcagacataaccatcaaaattctgcagttcgggggtcccaggttgattctcggactggcgctgaccgtccatcatttcaccaaagccgagtaacaccaatttatctatccaacttgctggaaacttgtttgaactttggagccaattgtgtatcaaaaaccaccgccatttgttgtttttcatgaattatttggtgattttcatgaattatttgggttggagttaagctggtttgtgttgaaaattggaagctaaaagaatttgaacaaacagttttgactgttatggagttgcacgcttttctttaacgaagaaattcactcgttctttgagcctccttcatccaagaactctgcttaatgacagagtccaagttttaggaaggagtaagtagtagtcgtattctggta

SEQ ID NO: 5672 - DNA, 440 bp, Lilium asiatic
cggacgcgtgggccgccctgaggataaagctgcaaagaaagagcggcttttgaagagggctcaggctgagactgaagggaagactgtcgaggtcaagaagcctattgtggtcaagtatgggcttaatcacatcacataccttattgagcagaacaaggctcaactggttgtaattgcccatgatgtggacccgattgagcttgtggtttggctacctgccttgtgcaggaagatggagataccttactgcattgttaagggaaaagctagacttggagcgattgttcacaagaaaactgctgctgctctgtgcctcaccacagtcaagaatgaggacaagctcgagttcagtaaaatcttggaggctattaaggcaaacttcaatgataagtttgatgaggtccggaagaagtgggaggtggcatcatgggatctaaatc

SEQ ID NO: 5673 - DNA, 453 bp, Lilium asiatic
cccatctccgcccccaatccctaatgtctcagtcccggcgcatccccgccatgacgtccggggacgatgccgacggtctcatcgcccgcatctcccgctccccgatcgtcatccgcagccgcgaggccgccgtcgaagcaggcaccgtcgctaagaagctcatccgcagcaccggtaaggccgcctggatcgccggcacttcgttcctcgtcctcgtcgtccccctcatcatcgagatggaccgcgagcagcaggttgccgatttcgagatgcagcaagcgagtctcctcggcacgcctggctaagttattggatttggggttctcggcgtaaggtgcaggttagggtctcttgagtcgagcttggataaagactgcatctttggaatggattacgtgatatgtcttggtataatggtttattgctgaaatagatgatgggtgagttagctgg

SEQ ID NO: 5674 - DNA, 244 bp, Lilium asiatic
cggacgcgtggtctggcttccgctcccccttggcctgaagccgccgtccgtctacggggtggtcgctgagcttcaccggcagggcatccgcaccatcccaccaacttcccgtaggtgaccagccgccgacgtgggaggcagaaacaccagaatggagccctgtggctgtaaataagaggcgagtagagtagacccggctctgttggtgccggcagagagatgataattgccgagactttggcag

SEQ ID NO: 5675 - DNA, 329 bp, Lilium asiatic
cccacgcgtccggcaaaatattcctataaattcaagaagttaagtccggagagggtatgactgggactgagtcctcgcgaaggacaagtccggagtttggttgaggatgctttgaagcgtgatatgggagtaggatttgaattcatttgaagattcatgttgatgctgaagaccactcgaagcttggagttgaattattatctctctgatctcttgtgagtttttatgctttgcaagttaatagttcattagatgcttttctatgttctttggcgtaaactgaagatcttatttgtgatgaatgaggaaagttaggtacctgtgagatg

SEQ ID NO: 5676 - DNA, 420 bp, Lilium asiatic
  modified_base (92)..(92): a, c, g, t, unknown, or other
  modified_base (95)..(95): a, c, g, t, unknown, or other
acgcccacgcttcctcccactcgtccgcttacgcttgggtaagaatgttgctgtcaaggaggctggtcgtggctttgttgcgagcgaactcnaangatgatccggctaaggaggcagccaactttacctctcttgtcatcatcattaaccatcctgggcagattgggaatggttatgctcctgtccttgattgccacacctcccacatagctgttaagtttgctgacatcctgaccaacatcgacaggccatcgggtaaggagctggagaaagaacccaagcttctgaaaaatggtgatgctggtatggtgaaaatgattccgactaagccgatggtggttgaaaccttctctgagtatcctccactggggaggtttgctgtgagggacatgaggcaaactgttgctgtccgtgtcatca

SEQ ID NO: 5677 - DNA, 458 bp, Lilium asiatic
  modified_base (384)..(384): a, c, g, t, unknown, or other
gccctaaagagcatgtataatgccgagaaacgtggaaaacgacaagttatgatcaggccgggttccaaggtgatcatcaagtttcttattgtcatgcagaagcatggatacattggcgagtttgaatatgttgacgatcataggtctggtaaaatagttgtcgaattaaatgggaggctgaacaagtgtggggtcatcagtcctcgctttgatgttggtgtcaaagagattgaaccctggactgccaggttgctcccatcgcgacagtttggttatattgtgctgacgacatctgcgggcatcatggaccatgaggaagctaggaggaagaatgttggcggtaaagtacttggttttttctactagttgatttcttttcttcgntctggtcggaatgttagaggttaagtacctggtgtttcttagaagagtgtttgaagatgtgtttggtatgttat

SEQ ID NO: 5678 - DNA, 435 bp, Lilium asiatic
cttcgctttcggcttgtaaaaaaaaaaaggaaaaagaggctttggctctttggcttcagcgtgtaaaaaaataaagaaaagaagaagagggttgcaggttctgctacctgttttgtggatgctggctgcggctacaactctggttttggttctcgaggtatagtgctggtgcgacaggtttacttccccttgctgcatatttctgtgaattatggtgaaatgctgctctttttctctccgatgggctgtgtgaggaggatctttgaatagaagcgtacagggttgataattattggcatttttttttatagtttaccctgaaattgtacattactgctgctgttgttgatgttgttgtaacattcaactctttttcagtcttaaagttagtcttgttactgctgtattttctgagcactcattttcagtctttag

SEQ ID NO: 5679 - DNA, 455 bp, Lilium asiatic
gaataatatgggacactgcaacttcgagcttgttccgaagtggtgcttccaagtgttcccgcctctcaaatacctcatgtacactccatcgtatcactctctccatcacactcaatttcggacaaattactcattgttcatgccaatttacgattatatgtaccacacaatggataagtcaactgatacattatatgagaggtccttaaaaggaaaagttgatataccacaagtagttcaccttacacatctaactaccttacaatcaatttatcatctccgccttggattcgcctcattggcctcgaagccttatagttccaagtggtatattatgttgatgtgtccggttacatgggtgaccatattgttgacatggatcttcggttcaacattcatcgttgagaagaataatttgaagaaaattaaaatgcaaacatgggtcataccgagat

SEQ ID NO: 5680 - DNA, 378 bp, Lilium asiatic
cactcacatgcgacactgaaacttaaaagcttgttccgaaatgaagcttccaggtgttcccggctctcaaatacctcatgtacactccatcaaatcactctctccatcacactcaatttctgacaaattacacattgctcatgccaatttacgattatatgtaccacacaatggataagtcaactgatacattatatgagaggtccttaaaaggaaaagttgatataccacaagtaggtcaccttacacatgtaactaccttacaatcaatttatcatatgcgccttggattcgcctcattgccctcgaatccttataggaacaagtggtatattatgtcaatgtgtccggttacatgggtgaccatattgttgacat

SEQ ID NO: 5681 - DNA, 391 bp, Lilium asiatic
  modified_base (68)..(68): a, c, g, t, unknown, or other
tggggagcctgtctcagatttaacatgtgttaacttcagtgagccttcgtcagtgggtttggaaaaanctgaaaggggggccaaaaaaaaccagttaattgttaaaatcgttgggttgaatttacttttggaaaaaaaattttcaatgttttggcaaatgggtttaaaaggctgacttgcttggagttcctatctttgcttttggtggttttcttaataacttcgaaatcatttgttatttcctattttggaatttcattaattgttaacctaaaaaattttttttacattccatccgtcccattccattaatttttaaaggaaggtttatttgttttaaaaaaaaaaaaaaaaaaaaaataaattataataaaataattatttaaaaata

SEQ ID NO: 5682 - DNA, 447 bp, Lilium asiatic
gcccggaccccatggttttcatgttcacgccctgggggataccaccaacggctgcatgtcgactgggccacacttcaatcctgctggaaaagtgcatggagcccccgaggatgagaaccgtcatgctggcgaccttggaaatgtgactgtcggtgaagatggtaaggttacctttaccattgttgacagccagattccactctctggacctaattccattattggaagagctgttgttgtccatgccgatcctgatgatcttggaaagggtggacatgagcttagcctgaccactggaaatgctggaggaagaattgcatgtggcattattggtcttcaagcttgagttacctatccagtgtcgagagtgtgagtcgtatcaagcatgagttacctatccagttatcttcccatctctagattgcaagtctcctgaataaataaacc

SEQ ID NO: 5683 - DNA, 481 bp, Lilium asiatic
ccgtcttgaattccggtcgaccacgcgtccgcccagcctccgctttttgatattggtcataattacgaagacccgagtctctgggagggctgccgaacttttacacccagtttgcagtctacttctatctgcaagacgacggaggaattgggtttcaccattgatgcagctgagtatggaaatattggaagatttataaatcacagttgttcacccaacatttatgcccaaaatgttctctatgaccatgatgacaagaggatgcctcacataatgttctttgctgctgataatatccctccattgcaagagctgacataccactacaattacagtgtacatcaggttcatgactccgaaggaaatataaagcggaaaacttgttattgtggttctcctgattgtacccgaaggctttattgacattggcttctaatgggttgagagtttatggctcttgtatttcgctttctcatctatg

SEQ ID NO: 5684 - DNA, 455 bp, Lilium asiatic
cccacgcgtccggtgttgcccgagttgtgtctgaggagttccggtgtccgacagggagacagcactccttggactatggcgacgaatccacgttcgaatcctggaatgagtgcctacagcatcataactaaatactaatcggtgacacaagaaaggaaaagctaccactgggtcatcgccgctagagcaggcgaacatagatgtcacccttggaagtatggtggatgtcgtgatcttagttaaatatcgaccttccactcccaatcagtcccgggcgattggaaatattggctagttaataatctccgggatgtttgggtcttcggagttgagcattcacgtttaaggttttcacataggggaatactttttgtagaataaatctccatgattaaaattttttagggttctaatttcagcttccattttgaatataatagaagaattgaaaagaa

SEQ ID NO: 5685 - DNA, 472 bp, Lilium asiatic
ggagggcatcccgccggaccagcagcgcctgatcttcgccggcaagcagctcgaggacggccgcacgctcgccgacgacaacatccagaaggagtcgactctccatctcgtgctccgtctccgcggcggcgctaagaagaggaagaagaagacgtacaccaagccgaagaagatcaagcacaagaagaagaaggtgaagctcgcggtgctgcagttttacaaggttgatgattccggcaaggtggtgaggctgaggaaggagtgcccgaatgcggagtgtggtgcggggactttcatggcgaaccactttgatagacattactgtgggaagtgtgggctgacgtatgtgtaccagaaggctgaaggtgagtaagctggtttgctcgttttggtggtttagtttctgaaagaacattgttgtgttgggattcagtttcaagtctgatgttttagttgagatgttgatgaatac

SEQ ID NO: 5686 - DNA, 458 bp, Lilium asiatic
  modified_base (298)..(298): a, c, g, t, unknown, or other
ggggcttattggagtactttttcggtcaggatggtaagggacgtcttcaacttgaaaagggcgtccaatttttgaaagatctgcataatgagattaaacgcttggaatttgctcactatgaccacatgtcaagaggaacaatttctggcaaggattttgcactttctatggtcgcttctgctaacattaaccacgtcaacaagttcctgaaccgggtagatgaactggacagccatcctcatcttagagacatccacatcacctttgaggaattcaagacctttgcagagctccgcanaagcttgcaaccgttggctctggcaattttttgttatggcaaagtaaatggtttgctgacaaagcaggatttccaacgcgcagcatcatatgtttagggtgtttcggtgactgagaatgtagtcgacatcatcttccatatattcgatgcaaacagggat

SEQ ID NO: 5687 - DNA, 316 bp, Lilium asiatic
agtctactctccatctcatcctccgtctccacggcggcgctaaaaagacgaagaagaagacgtacaccaagccgaagaagatcaagcacaagaagaagaaggtgaagctcgcggtgctgcacttttacaaggttgatgattccggcaaggtggtgaggctgatgaaggagtgccccaatgcagagtgtggtgcggggactttcatggcgaaccactttgatagacattactgtgggaagtgtgggctgacctatgtgtaccaaaaagctcgaagtgagtaagctgctttgctcgtttttgttggtttaactttctg

SEQ ID NO: 5688 - DNA, 524 bp, Lilium asiatic
  modified_base (375)..(375): a, c, g, t, unknown, or other
tctaaaaaaattaaataaaataatttttaaaaaaattaaaaataaaaaaaaaaaaaggaaaaaattggaaaaaataaaaaaaaataaataaaaaaaaaaaaaaaaaaaaataaattattatatatttaaaataattttcatttattttttttttttattttaaattttttttttttgtgtttttttaattttttttttttaaaaaaactctcttatttttttatcatttattgttttttagtttttttttggtaatatttttttttttttgtattttttttcctactttttatttttttatgtaattatatgtctttttttatattatattttttattttttttttttttttttaaatttttttcttttttatantatatttttttttttttttccctaaattatttttttattttattttttttatttaaataatttttatttttttttttattatatatttctcttatctaatattaatatttttcttttaatttttttttaataataattatcttttataa

SEQ ID NO: 5689 - DNA, 441 bp, Lilium asiatic
cggacgcgtggggcaaaccatcgataggtacaaaaaagcttgtgatagttcaaattcaaaggccctgatacaggtcaattctcaacaatactttcagcaagaatcagcaaagctgcgtcatcagattcagattttaactaatgcaaacaggcacctagtgggagaagctctgagttctctgactgtgaaggagctcaagcaattggaaaacagacttgaaagagggctcacaaggattagatcaaaaaagcatgagttactgtttgcagaaattgagttcagtcagaaaagggaggtggagcttcaaagtgacaacatgtacctgagagctaagatagcggagaatgagcgaactcaagcagctatcgtgcaagcaagggctgagttcgatgcgccttcaacatttgattccagaaacttctaccaggtcaacaacatgct

SEQ ID NO: 5690 - DNA, 442 bp, Lilium asiatic
taagagcacattcatgcatatgtcttcgatgtggtacgtgcacatgttcctataaggactgtggatgaactctttgagcagaagggtgatgttgcaaaagctgttctggaggaacttgaaaaggtcatgggagcatatgggtacaacattgagcagattcttatggttgatattataccacatccttcagtgcgcaaggcaatgaacgaaatcaatgcagcccaaaggcttcagctgtccagtgtctacaaaggggaagcagagaacatccttctggtgaagaaagctgaagctgaagcagaggcgaaatacctcggtggtgttggtgtggcaaagcagcgacaggctataactgatggcctgagggagaacatcctcaacttctctcacacttgttcttgcaccagcgcaaaagaaggtatggatttgataatgggcactc

SEQ ID NO: 5691 - DNA, 246 bp, Lilium asiatic
gtttgagggggcatgtgcgtcgttggcatgccaagtaggttttcctgttgggtttttaggtgtaatttgtgtactcctctctccccacccaaactcgtttcttttatatattagttgtttggttttcagtgtcgatctgatcgtttgagacattatctagctgtaatttgggtactatgtggtcccctgcgtcgtctttatttgatggttttaatggagtatttgttagaaaaaaaaatctttggt

SEQ ID NO: 5692 - DNA, 432 bp, Lilium asiatic
gcgtccattggggatcacaagatgaaacgtggtaacctggcactaaagaataacatggaatgggatggtccggtcagagttgtgcgaggacacgtttccccgaaaagttattgtggaaaagtatatacctacgatggcctctacaaggtttacaagtattggggggagaaaggtgtgtctgggtttactacatacaaatacaaactgaggcgtcttgatggacaaccgccattgacaactaatcaggtgtttttcaaaggagcacaaacacctaagtctatcacagaattgccagggttggtttgtgaagatattagtagcggccaagaaaactaccctattcctgctacaaatgtggttgatgatccaccatttgcacctatagattttgcatacttgaagtctctcctggtggcagataatttaaagata

SEQ ID NO: 5693 - DNA, 459 bp, Lilium asiatic
cccacgcgtccgcgccctcccaaactggaccatccatgggctcgtggagttcatctctggtgggcctcaggcaggtggcatgttcttccctgtcccccatggtgtccatgcagttcgtctaggcaatgaggcctccatctcccagaacatcactgttaagccgcgatccttgtactccctcaccttcactaccacaaggacgtgcgcgcaagatgaggtactgcgtgtctcggtcccgccgctcactggtgacctccctatccagactctatatagcaccaaaggcgatgcatatgcctggagcttcgtcgcatcaaatgccactgttacggtagtgttccacaaccctggaattcaagaggatcctgcttgcggccctcttttggatgcagtggcaatcaaggaactcacccctcaataccctaccaaagataacttggtgaggaatggtggctttga

SEQ ID NO: 5694 - DNA, 461 bp, Lilium asiatic
ggagaaggcgttgtttgagataatgtggacctctcagaacataattgaggggtcagagggggcgatagtggggaagctgagggaagtggggcttatgttcagtttgcagccgaagatcccagctcacatatcggcaagcatcgagaagttggttggagaggcactgcgtccggtgggaatcaccgactggaacgaggcattctgggttgtacacccgggtgggagggccatacttgatgtgattgaggagagacttgggttgagggcggagaaactggcgagcacgagggaggtgctgagagattacgggaacatgtggagtgcttgtgtgttgtttgtgatggaggcaatgaggaggaggtcggaggagaaggggctggcgactgctggagaagggctggagtggggggttctctttgggttcgggcctggcctcactgcagagacggtggtgctacgat

SEQ ID NO: 5695 - DNA, 446 bp, Lilium asiatic
ggactggtatctttgaagcaagtaaactagtactagtaaatattgcaccagggattccagagatccaggtacaatctttggcatccttctgcagtacattcctggggacagcagtgagaataccttgtgaggttttaaagcaaaggttgcaggcaggcatgtttgacaatgtaggtgaggctattgtgggtacaatgcatcgggatggtttgaaaggcttctttcgtgggactggtgctacacttttacgagaggttcctttctatgtggctggcatggggctctattcagaaacaaagaaggctacccagaagttgcttgaccgtgaacttgaaccttgggagactatcatggtgggggcactctctggtggtcttgctgccgtcgtcacgactccatttgatgtgatcaagacgagaatgataactgcacctctgggatttccc

SEQ ID NO: 5696 - DNA, 291 bp, Lilium asiatic
cgtgcgggagaaggccttttttgatataatgtggacctttcacaacataattgaagggtcataaggggctatattggagaagcttttggaaatggggcttattttcattttgcaaccaaagatcccaactcacatatccgctagcatcgataagttggttggagaggcactgcgttcttatggaatcaccgactggaacgaggcattctggtttgtacacccgggtgggaggtccatacttgatgtgattgatgaaagacttgggtttgagggctgataaactggctatca

SEQ ID NO: 5697 - DNA, 387 bp, Lilium asiatic
gcctgagccggtcggagctccggtagtgctccgctgccggaccccctccgaggagatcagggggactccaaaatcccgcaccggattcaccaaagcctcccaagcacttccacatatccaatttcaaaattggtcgagccatcttggagatctgacaatttcagtcaccgacaaaatccggtcttctctactctgataagccacgcctctctaaaagcttccattcctcttttctctcattccccttggctaattaatcatatttctaattgcttctttgtttttatttcaggtcattgaaacagagaaaaattgaatgtttcgaggaggagttggatacttctaggagggtgaggaatgtcggagataattccagaaagggtttag

SEQ ID NO: 5698 - DNA, 452 bp, Lilium asiatic
tttctctttcccaagctctgaaaatggacgacacattcgatccggatttgattcacgccagcttcaagctcgtctggagcagaagatcagagaggatcgagacgaacgatgatatcgaagtcatcgacctcgaggcaggggctgggacatctaagaagagtcggccaactacagctaatttaaatggtctgaaggttagttgtgaacttcttcgactctttgtgacagaggctgtgcagcgtgcttccgtaattgccgatgcagagggccttaataaaatcgaagctacccatttagagaggatacttcctcaacttcttctagatttttaagattgtcatcaaaagtattcttcaagacaatgcctggaaggggtatatacatgcaacctagatagccagttagcaggtacggggactttgaatgcttaaatatagaatccaatctcgtgc

SEQ ID NO: 5699 - DNA, 429 bp, Lilium asiatic
tttctctttcccaagctctgaaaatggacgacacattcgatccggatttggggcacgccagggtcaagctcgtctggagcagaagatcatagaggatcgagacgaacgatgatatcgaagtcatcgacctcgaggcaggggctgggacatctaataagagtcggtcaactacagctaatttaaatggtctgaaggttagctgtgaacttcttcgactctttgtgacagaggctgtgcatcgtgcttccgtaattgccgatgcagagggccttaataaaatcgaagctacccatttagagaggatactttctcaacttcttctagatttttaagattgtcatcaaaagtattcttcaagacaatgcctggaaggggtatatacatgcaacctatatagccagttagcaggtacggggactttgaatgctt

SEQ ID NO: 5700 - DNA, 235 bp, Lilium asiatic
tgccaacttccccttccttccatctttcctttacaacatcattccttcataaaaaaatattttctatgccttattatcaaaaaaccattattacaacatgattcctttaaaaaaaaatattttctattccttattatcaaaatgccattatatcgtatcaaaaccattatgttccatatctattttacttcatctttaacttaataattactttataattctttttcttctttat

SEQ ID NO: 5701 - DNA, 262 bp, Lilium asiatic
gcggcacgcgtccgccacgcgttcgggcgaagtcttctagggcatgcatcttcctcctccgtgtgatcgccgggggcaccaccttgtaagccgccgccgtaatggccaccagccacaaaaccgtaatttttttcggcataaacatgggcgcaaaattccaaaacactccttccttggggaatttcgttatcgttaacgccattgttgttttttaccccttctttacccttttcgggccgccataaagcttttttgcaaaacc

SEQ ID NO: 5702 - DNA, 469 bp, Lilium asiatic
gcgctaacacattatctctttttcgtaagattatgacatatataaagttgcaacatatcttattatacatgagggacaatacctgataggatgcacgttttcagaaccttggaaccatggagaatcctgggatgaatgcaattgaataccacagcaggccgagcattgtaagtctataatgttccattatgactatatttatcttccgcacatgtatgatatattgttgaagtgccaaatgtcattttattggaatattttagaactttttggtatggtttacccgatctgtttcgggaccttttcaaatcaaaacgcttcggccgaaacaggccgaaaccaggtagttttgattttgcttattttttttaaattcataaaattaaaatgaataatcaaatattatataaatatctcgaaaatttacaattaattgtaaaaaataaatatgttttaagaaaattgtgaa

SEQ ID NO: 5703 - DNA, 472 bp, Lilium asiatic
gcgggagaatcggcttacagggcaacaagcccagattgatgttaatgtggtagctcactctatagaaaatctagaccatcccaatgctaacacaccttcggacaatgcaggacatggagatgtgagagtcacgaagaacaatgtgactacaagagtgtcagcaaaatctcctagtacatttaacattaacagaagcaaagctcgttctgcaacgtcgcaaagttctgactttcaatacaacgagagttctggttcatcgtcttcaatctgcacgcccacgccttccaccctcttagggtcgaaaaggactaaggagagtcgtaacaacaggcccaactacatgagcttgacagagtcgatcaaagcgaagcagaagaagactatcttttgcgagggacagatgcagtcagagggaacaaggtttctcaaggattttgattcgaagagtaatgatggttcatatccttcacat

SEQ ID NO: 5704 - DNA, 107 bp, Lilium asiatic
gcgtttcagtggctctgtgaagttgccgcatattccccgtccgaagatgaaggtctgcatgctcggagatgctcagcatgttgaagaagcttaaaaaaatgggcctg

SEQ ID NO: 5705 - DNA, 457 bp, Lilium asiatic
aggtgttcgaccgcatcaaggaagactccggcaaggtcgccctctccttcgaggacgtctggatcgccgtcctctgcgtgtacaatgatatcaacaagcacctgccggggcgtcataacgatccgccgacgaaggagagccttagagccatgatgcaggaatatgatgttaacctggatgggctgctcgaccgggaagagtttgccgagttcatcaggaaattgacagccgatacagtagctgccgtgagtcttaatctgttgattgcattggtagtggctccagcagtggcaatggcggcaaaaaaggcgactgagggcgtgcctggtgtgggcaaagtgttgcagaaagtacccaactccatctacgcctccgttgtggctctgggagttatgctgatccaaaattctagcgagggaatcgagtaaccaagttgtggtcctgtcagtatattttt

SEQ ID NO: 5706 - DNA, 432 bp, Lilium asiatic
ttaattccggtcgaccgaacgtactcttactgaattccccctggttcttatttttatgcttgaaatcaattgaattccggaatgaattcactggtttctgagctattttattctaaatcaccaataaatattagggattctgggacacttgtttcccgtttaatgatcttcggtactttgaatacacattacatacattatccttcaaagtacctgatgctgtcacctacacttatcacgcacaccttaatacagttactgcgatttattttttttacgctctcaagcaccaatgtctcaccctgtaccgttttggaagctcaacttcttctcttttatttcaatcttggtgatgctgctatttttggcttttaataatattttcttctgtaagcttttgatggatcaacctttttgtatcaacttcaattt

SEQ ID NO: 5707 - DNA, 481 bp, Lilium asiatic
  modified_base (77)..(77): a, c, g, t, unknown, or other
gaataccgggccgccgacgcgtacggcggcggtgactgtgtctacggacatcctgttccttgcttataatggtgatnagagggtaagttggatcaaggagtgcggagtgttcggcatcttctgcaagagggcgtctgcgtccgtgggcatcaccttcggggctgtggcttgctacatcctcctctctctcatatcctcgtaccggctcttcagcacctaccaagctcccatccctttcctcagttccaagggtgttgagatcgcggcctttcctcgctgaggctgatagctccgcccgttctgcagcaagtcgacgtcgtgctcatatattgcgtactttggtatcatggtttgcaaataatatgttctcgctaaaattgtctctctttcttacttctaattatgtttgcgtgagcgtggttctaaagttgaaatatgtccaactcgtatcaaagctatattaatatgtagattgatcaca

SEQ ID NO: 5708 - DNA, 439 bp, Lilium asiatic
aaaaaaaaaaaaataaaatataaaaattaatttaaaaaaaaaaaaaaaaaaaaaaaaaagaaagatttttttaaaaaataaggcatggttaacatataatactttttacaattaaataaaatatacttataaaaattaaaactcttaatttgctgccccccccttttaaatatctttatttccccaacccctaattacaaaactttttttttttttttttgtcataaaatataatttaatttcccctttttattacactttttaattttaaaaacttttcttttcccaattttttaccttttctaaaaatttcctttttttcattattttttttactaaaaattatttttcctttttccttttttaaaatttttaaattcttttttttttatattttcccccctttttaaaacttttttatctcctttttatttttttt

SEQ ID NO: 5709 - DNA, 452 bp, Lilium asiatic
cccacgcgtccgaccagatcaggattcatgaggcgaggcggacggatttctatttgcgctggcggagcatgccgattgttgagggttgcagtggggtgaggtttgcaccgtaccagttgttctatgagggtattgaagcggagctgcaggattcgggtcttgcagaggagacggggaattgggcgaatgtggatgatttcaagtggttgcgggcggttcagtcgccgaattggtgtgtgataccggaggaggagagggttgggactgtggtggtgacggatttggaggaacaaggcggcggtgattagttcttttgagtgttatgtaagttggttgttctgtactattgtctctggttttttgcaaaattgcatgattaatcgagttgtggtttttatagctatgtcaatggattcatattatttacttttggaaatggcaatttaattttg

SEQ ID NO: 5710 - DNA, 432 bp, Lilium asiatic
accactcgttcgaccactccttcgaagacttctgggattgtgcaatactacagctaacaggggcaaatatgttatatgacatggaaatgaagagaactctgagagaatgtgttcttgtgttatctgagattagaaaaaacatgtattttgagatatagggtttcgtgtaaaaaagaaagaaaaaaatcataaaataaaaaaaaaaagacagttttaaacgggctatgtgcttaaagaggatttaaactatcgtcattctcgcattctaataaataaatcttttatagggggcccccatttaaaataaatcaacttttctttcctccgctttaaatacaaaaacccttgctttaccaaactaaatctgaattcatttatcgtctctttaaaaagctggcattttagaaaaaaatgcccaaacccaactcactt

SEQ ID NO: 5711 - DNA, 365 bp, Lilium asiatic
catcaccaagccggcgatccgccgcctcgctcgccgcggcggtgtgaagaggatcagtgggctcatctacgaggagacccgcggggtgctcaagatctttcttgagaatgtcatccgcgatgctgtcacctacaccgagcacgcccgccgcaagacggtgacggcgatggatgttgtgtacgcactcaagcgccaggggcgaactctgtacggcttcggcggctgatgggtttggtcttctgcaacctttagtggtgctggtgtctatttccttttgctgtcgactggtaatcctagtgggtcttctgttatgtttcctgtaaaatcaccagatttctaatctaattttgaattggaagaagttt

SEQ ID NO: 5712 - DNA, 370 bp, Lilium asiatic
  modified_base (75)..(75): a, c, g, t, unknown, or other
ggtcgaccgacgcgtacgcatcaccaatccggcgatcctcctactctctctcctcagttttgtgaatacgatcanttgggtcatctatgaagagaccctcttcttgcttaaaatctttcttgaaaatgtcatcctccattctgtcacctacaccgatcacgcccgtcgtaagactgttactgtgatttattttgttttctcactctatcaccatttgcgaactctgtacggctttgtctgctgatgcttttggtcttttgcaatctttatttgttcttatgtctattttcttttgctgtttactgttatatctagtgagtctttttttttttatcctttaaaatcaccagattttttatctgttttttta

SEQ ID NO: 5713 - DNA, 107 bp, Lilium asiatic
tcaagagacgtgtatgagaattaggcacattggcacataccaattcttgccaggacagcttgggtaatttaggccacacacgagggaatgtcctaatgggggatgga

SEQ ID NO: 5714 - DNA, 238 bp, Lilium asiatic
tcaagagacgattttgagaataaagaacattgtcacataccaattttcaccgtgacaactggggtacttaacacctcacacctactatcttacaaatagtagatgtgaagaatcacactcaaagccattcaaaacagagaaactatatactgataactccctagctcttataatatcattcaccggatctagtatcataagatacttgttaactaattataaacttggcctgtgctat

SEQ ID NO: 5715 - DNA, 446 bp, Lilium asiatic
ttgactcttgttgcacttgtaccattggtttttactattttgtgtgtacttttagagattagactcaactagcttctcggaatatgtatcgtaagtgccaagtgtcttagtagtagatgatttacaaacgaatgattgatttataggacatggtttgcaaagcaaaaaagagttgggaatcaaaaaggatatcggacttgaataaagctctgcttggtataaatttgttttgagtctcttaaaactatttttttttatggaagacaatatcatcaaagaagtgtagaataatcagactagtttacaaaggaatccccaaagccttcagaaaaaaagcttatggagatgaatctgggaattaaagcaaaattttagcagttattcaaaagtttagttatgcccgaaaaagtcaattttgaataggcccgtggttctcatattgaaat

SEQ ID NO: 5716 - DNA, 456 bp, Lilium asiatic
ctccatcaacaccaacaaagccaccatccaccacaaccgaggtacactcttacaccttttgtgcccttattttctaatttagttggtgttttgtgtaggactttggaaactagagcaagcccggttttggagaagaagtagggacaaatggaagctataggtcggctcaaaggagggtgaagggctcaaggaggagaaaaggagaaagagatgtgcaaggaggggtctataagagaagatgaagaccattgagcaaaccccccccccctctctaccaccggatctatctagcaaggctttggggctctcaactcggccaagggaaaccgaatccgaggagagattggtcttatgatggtcttttactttccatttcatccataagttttcttttatgttggaatttggtctttttcatcaatgaatccgaaaagtttttggagctcattttatttc

SEQ ID NO: 5717 - DNA, 401 bp, Lilium asiatic
cgacggtggatacgcacagatggggtatccgagaccgtcaccaccgccgcatcagccgatgcgaccacaaggtgagccgatggggaattacttcagtgacgagaacccgaatggatgctcagtaatgtgagtgaagaagtggtagagatgatgggtgcttaatggtgttgagttatacggttatttttaatttcatttctaagtttttgttacttttttaagtacgatgaatatctagtatagagttatattagttatcttgtagcacaaaggtgtgagtggtggctggaggggtataagaggtttgggggacagagcttttattgagactttatttgagatggtgaggtgtcaatatatgtttataagttgagaaatgataataaagtgttggtttgttg

SEQ ID NO: 5718 - DNA, 296 bp, Lilium asiatic
acagtaaaggggaggatgggatattggtgccggtgaatttgccggctccggtgatgcagaggttcgaggcggagatagagcagatgctcgctactgtggaagaagaagagatctgcatcaccacctccgtcgtcaccaagatggagatcaaggtgtagcaaaacaccatgcaatgattgagtggattcctggtttgatttggttaagtttcttgtaaactaagaatatcctgaaaaatatctatggattctcataccgcctccatattcttaatatattttattgggatctccatc

SEQ ID NO: 5719 - DNA, 231 bp, Lilium asiatic
  modified_base (112)..(112): a, c, g, t, unknown, or other
cggacgcgtgggcggacgcgtgggttgatgctttccaacagatcctgaaaaatgagggtgcgaattcactgttcaagggtgctgttgcaaacatcctccgtgcagtggcggntgctggtgtgctagctggttatgacaaactgcacttgatattcttcggcaagaatcacggctctggtggagcttaagtctgatggcgatgaaaaaagaaacttcttcttttttagggtt

SEQ ID NO: 5720 - DNA, 362 bp, Lilium asiatic
tctttctccgacttatttcccaatttccgatggagtctggaaagacaaccaaggggggggctggacgcaagggcggggccaggaagaagtccgtcccgaaatccaccaaggccggtctccagttccctgttggccgcatcgcccgcttcctcaagaagggccgctatgcccagcgggtcggcactggagctcccgtctaccttgctgctgttctcgagtaccttgctgctgaggtgttggagctggcttggaatgctgccaaggacaacaagaagtcccggatcattccaaggcatctgtgtctgggcgtcaggaatgacgaggagctgagcaaactggctgctggggtcacaatctcttat

SEQ ID NO: 5721 - DNA, 198 bp, Lilium asiatic
  modified_base (13)..(13): a, c, g, t, unknown, or other
acgcccacacgtncgaaagaaatcagtataatagatctcggtaacatacacagtgggagaatcaggcattcagataccagatgtcacactcttccatcagagagctaccctcaaaatggtggatatccataaccaagttactaccctactacaagtgcacctgtactgcaatggaagctattctgcctacgggactta

SEQ ID NO: 5722 - DNA, 276 bp, Lilium asiatic
acgcccacacgtcctaaagaaatcagtataatatatctgctaacatacacaggagtggaatcggggattcagataccatacgtcggtctcgtccaataaagagataccctcaaaatggtggatatccctatccccattactaccctcctacaagagcacctgtagtacaaagtaagctatgctgcctactgaacttattgagctcatcattatctaaggcctccctcggcagtgtgcatagcatatggatatcaacacaatgctaataccaattct

SEQ ID NO: 5723 - DNA, 378 bp, Lilium asiatic
cccagctgaacgagaagatcttctggaggatgtttgatgcgattctttatggggaatgcggggagaaatatggggctattggtacctttattagcacctactacaacgtgtacaacgggaggaagaccgggatggaggtccaggaggacgaggatgacattgatgattctgtctatgctgcggacaattcagatgagctgttagaagggtttttatttcggtaggccgctttttgatcccatctcccaacccgaactgtattatgttattagatatgccccccccccctctgggtgtattatgagctgccttcgtttgttgattctaatatgtaatctggtgtccgagacattttcttagcctttttattatgaactc

SEQ ID NO: 5724 - DNA, 459 bp, Lilium asiatic
atatcggccaacggtgaaagggaaattggtgaactcattgcgaaggccatggagaaagttgggaaagagggagtcatcaccatctcggacggaaagactctttacaatgagttggaagttgttgaaggaatgaaactcgataggggctacatttctccatacttcattactaaccccaaaacccaaaaatgtgaacttgataatccacttattgtgatacatgagaagaaaatttcaagccttaatgcagtggtgaaggtgttagagttggctgtgaagaatcaaagacctttactaattatttccgaagatgtggaaagcgaggcactcgcagttattattcttaataaacttcgtgctgggatcaaggtttgtgccattaaagctcctgggtttggggaaagtaggaaagctagtttgcaggatgttgctattctgacagggggtgagcttataact

SEQ ID NO: 5725 - DNA, 370 bp, Lilium asiatic
atcacctccagaagtgccgccatctcgtcgacgagtacctcgaggccactcgcggcgtcggatggggcaaggaccaccgcccgcacgagcttcatggcccgaagaaggaagcggagtagctgtgaatactgatccgaggtggtctgaacccgttgggatataactttgcagcatcttattccgtctaccagttgctttcttttacattgaaattgtagcgcatcactcgctaattttcttgttgattttcaataaaagtgctgttttgaaacttgtgttgccttgttttcccatggataagaagaaagctggttgaagctagactgtatgtactggtgctttattactttgccaaatgaatcttgctttc

SEQ ID NO: 5726 - DNA, 315 bp, Lilium asiatic
acgatatcctaacaatgaccttataatacgtactatttttactttgagtcactttttgagtatagaatttttagatcgatcgactggaattgcttctttagatataacatgttctagtacaataccttatcgtaccatgaaataataattccatcaattaataactattcatttttgatatatcatactaataatactttcttattcttcaaataatttttaaaattctaccatacattgacaactcatctatataatcttcaagaaattatacgttcatatccctgaagagacttatcacataccactcatatt

SEQ ID NO: 5727 - DNA, 374 bp, Lilium asiatic
ctcaattctctcactaatggcgcccaaggccgagaagaagcccgcggcggagaagaagccgggcgtcgaggaggagaagaaggcggttccggcggagaagaagcctgctgagaagaagcccaagggcggaaagaaggtcccggcctcgaaggagggggcctctgacaagaagaagaagaggtcgaagaagtcggtggagacctacaagatctacatcttcaaggtgttgaagcaggtccaccctgacatcgggatctccagcaaggcaatggggatcatgaacagcttcatcaacgatctctttgagaagatggctcaggagtccgcccgccttgctcgctacaacaagaagaacaccatcacctctcgggaga

SEQ ID NO: 5728 - DNA, 457 bp, Lilium asiatic
ctgacgcgtgggttgggccatcaacgaaggcaggcaagcaccatctcagggggatgtgtgggtgatgaaagatgatgacaatgaacatactgctaccaccaccagtgaggagggcaggcttgcgaaccctgataacagacaagccgtaactgcataggaagtcttcttctttacttaagttgtattggttattagggttcattttagggtctgtgtcagaagatcggaacacgtggagaatgaagctttctcagcagggttttgttactttcagaaaactgcagagggtctgctgttgcgcatgcgatatagctgatggcattctctattctgttactttctcttgttggagcgttcccaagcttcttgttgatgaaataatgaaaggagctttggtttttcgaaatataagaacctttagagttgcaatatatgattttcgtgtttgaatgaattt

SEQ ID NO: 5729 - DNA, 447 bp, Lilium asiatic
  modified_base (404)..(404): a, c, g, t, unknown, or other
gcagacgataatactccaccgtcgcactcctcatcacctctccttttataaattttgatggaaaaatcaaattaatgggttttattttatttgtaggtgatcactctcaagcaccggctataaaatggaactaaaggagcaacattcagggcctctctctcgccgtggagtcctttcccttggaggagctaagggggaggggcagtgcagttggtttctcttttaattggaggtagtggtcgggttctatcttctcagtccgagagggaggagcaatatatgaaggattctgattttgaattgaagaaggagaagaggaatggtagttcttattgcgtgagcttggtattatcacatttgttcaaattatgctctacttagtgtatgatatgttgttaacaaanaatgttattatgtgatattacattcagtctctacactggtatt

SEQ ID NO: 5730 - DNA, 302 bp, Lilium asiatic
gttcggtgtggtctttcggattaaaaaaaataaaaaaataaaaaaaaaaaaaaaaaaaaaaaaaaaaagagaaaaaaaaaaaaaaaaaaaaaaaaaaaaaaaaaaaaaaaaaataaaaaaaaaaaaaataaataaaaataaaataaaaaaaaataaacaaaataaaaaaatggggaaacccttttattaaacaactttttcacctcgcaaaaaataaacatatagccatttttctgggtctctaaaataaaaatacctttcgcccttttaaaaatttgcgaattgtaaaaatttaatggtac

SEQ ID NO: 5731 - DNA, 381 bp, Lilium asiatic
cccacgcgtccggtcgtatagggctgttaatgtgatggatgagacgatgatcattgatgatgctaaggagaagctgtgtttcgtctcgcttgatgtccctcgtgacctccgccttgccaggcaattgggaaaagataacccattcaagtgcacatatgttctccctgatggtattacacatacaagaggttttgtaaaagacatggatgaagcaaaaaggtttttctctcttgaagaaggaagctcaactccatcattgggggtgaaagatgcaaccaatcgacaggctgatgctgataaagcggaggatagacggagaatcgacttgacaaaaaatgaattcaacttgaccaatgagcgattccttgtacccgagatgct

SEQ ID NO: 5732 - DNA, 436 bp, Lilium asiatic
ccacgcgtccgggaagttcgctagctctatccaaagggaggtgccaggggtggaggtgcgggccctctttgtgacatcgaccatggagctaaatcaatggcggtagaaacctccagccaattcgcgtaagtaaggcagcctattatgttacctttgattgacccagtcattgacgcatttaaggttccatttcggttgtttggagatggatcaacaagtataacaaagtggcacgtgaatgggcttctcctctttccttcttatgggatatagcttcttccctaaaaaatggaaaggcttcccttccttcctgtggttctctgatctctaactaattgtgtgaatttatgttcgcctcgcctgggctggtctagcactatagggagatttgacatccagtgatcagcgatatctatctgtctctttcattccacat

SEQ ID NO: 5733 - DNA, 444 bp, Lilium asiatic
aattggagatggggaagcagcaggacatagagcactctcaccttcacgccaatggcctcgggcttcacatagctcaaatcggagaagtggtcttccttcacggttttcctgagatatggtactcatggaggcaccagatgattgctgtcgcagaggccggattccgagccctggctccagacttccgcggctatggcctctcggaccagccaatccagcctgagaccgcctcgtgggacgatatcatcgccgatctcctggcaatccttgactctctcgccatccccaaggtgttcatggttgctaaggattttggagcgataccagcatatgattttgcaattcggcacccggatcgggttctgggagtcatcaccatgggtgtgccttaccttgccaagggctcaactttcgagtcgcttccagaaggattttacatatcga

SEQ ID NO: 5734 - DNA, 436 bp, Lilium asiatic
  modified_base (431)..(431): a, c, g, t, unknown, or other
cgacggctcctgatgtctcgctcgcccgcctcaagttctgctctgagtgcgaggccgccgtgaacgagcagatcaatgttgagtacaatgtctcgtatgtctatcacgccttgtatgcttactttgatcgggacaatgttgcgcttaaaggccttgctaaatttttcaaggaatcgagtgaagaggagcgacaacatgctgagaaatttatggagtaccagaacaaacgtggtggtaaggtgaagctccagtctatcttgtgcccccctactgagttcgaccaccctgagaaaggagatgcgttgcatgccatggagttggctctctctcttgagaaactgacgaatgagaagctcctcaacttacatcggattgcagatggttccaatgatcctcagttggtggactttattgagagtgagttcctcggngagca

SEQ ID NO: 5735 - DNA, 293 bp, Lilium asiatic
  modified_base (57)..(57): a, c, g, t, unknown, or other
aaaaaaaaaaaacaaaattaaaaaaaaaaattttaaaacttataaaaacatccccgntccctgaccaatttgtcaactttcctcgtgccttcaaaaaacaatattatcaatttcttttaacctcattaaaatcaatctactggcccttcatttacacccccccacactatacaaatcatttccttaccttaattacatgtcttatatacaatcaacatttattcaaccacctaacaatccctaatctctccattctttctttactaacacactcatttttcatccattatttc

SEQ ID NO: 5736 - DNA, 406 bp, Lilium asiatic
cgcaggagtggctcgacaagctccccccgccgacctacgacgagaagtacgtcctcacccggtgctccggcaatcgggttttgaacaagcacgcgcggctcggctgtcaggtcgtcctcgatcaccagctccaaggtatggttgtcgctgttcccgagcccaaaccctgggacattccgtaaggctcggtggctatacgagcggtgagcgaggctcggggatgtttgattatctagtttcgagaataatacttgccctgtgcctttcatttaatttctattgtcatttcgagacaatgtatgatttttgttgatttgtatgaattagatgttgtgtttgaaggctatgaattgcctctttatcatgaatgtgatttggtgaaatgtattttcaccgtggaagactt

SEQ ID NO: 5737 - DNA, 457 bp, Lilium asiatic
cggacgcgtggcggacgcgtgggggcgtcgtcgcagcaggacggaggaggagcggcggcggagccggcgctgaggaagccggtgttcacgaaggtcggccagctgaagccgggcacgagcggccacaatctgaaggcgaaggtgctcaactcgaacgtcgtgctgcagaagtctcgtgcggcggcggcgcacatacatcaggccaggatcgccgagtgcctcatcggcgacgagaccggcaccatcgtcttcactgcccgcaacgaccaggttgatgtgatgaaaccgggcaacactgtgattgtccgcaatgcaaagattgatatgttcaaggggtcgatgaggctggttgttgacaagtggggtcgtgttgaggtcaccgaggctgctgactttacagtaaaagaagataacaatctctcgctggttgaatatgagctggtgaatgttgtggaag

SEQ ID NO: 5738 - DNA, 220 bp, Lilium asiatic
  modified_base (133)..(133): a, c, g, t, unknown, or other
aaaaaaaaaaaaaaaaaaaaaaaaaaaaaaaaaaaaaaaaaaaaaaaaaaaaaaaaaaaaagggaaaaaaggaaaaaaaaaaaaaggaaaaaaaaaaaaaaaaaaaaagaaaaaaaaaaaaaaaaaaaaaagnggaaaagggaaaaaaaaaaaaagggggaaaagaaaaaaaaaggaaagggaaaaaggaaaaaaaaaagggggggaaaaaggaaaaaaa

SEQ ID NO: 5739 - DNA, 435 bp, Lilium asiatic
cggacgcgtgggctgaggcttacaaaattttggacgggtttgaagaagacccactgcatcgcatgactcccacgtgccgagatccctcaaggtgggaagaaccaactcccactccctcttcccagatggggagcagatgcttagcttctcctccaatgttgctacctctccctacttccatcatctctcatcaccatcgtatgcatggaatccagacttggtttatgggatctcaaatgggagcatgcatgggtttttgggaggggctaggggccctttcactccatctcagttgatggagctgaagcaccaggccctgatctactcttacattgatgcaaagttgccaataccctccagtctgctcaactcaatcaggagggactacaatccatctgtgttctctgccttctcagctggatcttatggattgac

SEQ ID NO: 5740 - DNA, 400 bp, Lilium asiatic
cctgactgagaggggctacatgttcacaactacagctgaacgggaaattgtccgtgacatgagggagaggcttgcatatgtggctctagactatgagcaggagctagaaacagcaaagagcagctcatcagttgagaagaattacgagctgcctgatggccaggtcatcaccattggagctgagcgcttcagatgccctgaggtcctgttccagccctcactcattggaatggaagctgctggcatccacgagaccacttataattcaatcatgaagtgtgatgttgatatcaggaaggatttgtatgggaacatcgtgcttagtggtggatcgacgatgttcccgggcattgctgaccgtatgagcaaggagatcactgcactggctcctagcagcatg

SEQ ID NO: 5741 - DNA, 361 bp, Lilium asiatic
cgcgtacgccacgcgtccgcggacgcgtgggatcgtctttcgctctcagcaatggccggacgtggcaagggggtcgggtccgcatcggcgaggaaggcgacctcgaggagcagcaaggccggtctccagttcccggtcggccgtatcgcccgcttcctcaaggccggcaagtacgccgagagggtcggcgccggcgctccggtctatctcgccgccgtcctggagtatctcgcagccgaggttttggagttggctgggaatgcggcgagggataacaagaagactaggattgtaccgaggcatattcagcttgctgtgaagaatgatgaagagctttcgaaagtgctggggatggtgacta

SEQ ID NO: 5742 - DNA, 425 bp, Lilium asiatic
gatccctctcctctccctctcctgtcacgatctccgagcacatcagccatggcggatcaggtcactgacgatcagatctccgagtttaaggaggcgttcagcctgttcgataaggacggcgatggttgcatcacaaccaaagagcttgggaccgtgatgcgctccctgggccagaacccaacagaggcagagctccaggacatgatcaacgaggtagacgctgacggcaatgggaccatcgatttcccagaatttctgaacctgatggcccgcaaaatgaaagacaccgactcagaggaggagctcaaggaggccttcagagtgtttgacaaggaccagaatggcttcatctctgctgctgagctccggcatgttatgaccaacctttgcgagaaactgacagatgaggaggttgatgagatgat

SEQ ID NO: 5743 - DNA, 397 bp, Lilium asiatic
  modified_base (382)..(382): a, c, g, t, unknown, or other
cggacgcgtgggtggaaatgcagcaatcgaatcactagatagaatgagggaggaaagcaagaaagcaactcttaagcttgtagacatggaaagcagctatctaactgttgatttcttcaggaagcttcctcaggatgtcgagaaaggcggaaatccaacacattctatctttgatagatacaatgatgcatatcttagacggataggatcaactgttttgtcttatgtcaatatggtatgtgcaagcttgcggaactcaatccccaagtctgttgtatattgtcaagtgcgcgaagcaaagaggtcactgcttgatcatttcttcacagaattaggggcaaaagagtctaagcacttgtcatctcttctggatgaggacccngctgtgatggaacgc

SEQ ID NO: 5744 - DNA, 175 bp, Lilium asiatic
gaattgggtccaatggaaatcctcacatttcttctgaatttccagtttcggtcagcggtatccttatgagcacaagtatcttaatttccccccgttcccttgctaaataaaaagtttgattgatacgtgtaagaccttcgcaaattttctctgtgtatgtttatcataatcaacc

SEQ ID NO: 5745 - DNA, 372 bp, Lilium asiatic
ggcggatctcgacctcgccgggaaccagatcaccggcgggatcccggccgggctcggagggatgactgtgctgtcgtggctgtacctggacgggaaccgcatctccggcgggatcccggccgggttgctcgcgaacaaggggttggggattttgaatctgagccgcaactcggttgagggggcgattccggacgcgttcggatccggatcgtatttcatggtgttggatctttcgtataataggttgacgggccgggttccggcctcgctgtcgaatgcgatgtatgtggggcatttggatctgagtcataatatgctgcgtgggccgttgccgaatggggctctgtttaatgcgttggaggtcgggtcgtt

SEQ ID NO: 5746 - DNA, 410 bp, Lilium asiatic
gcttacattcatggatggctaaggcctataaggggattttaaaaaaaaactcagcataaaacaacactaaaaccttaaaaactccacttacatgactctcttaaagctcaacaaagactcacaacaaaaaaccatgatgaactctccactccgacatcacttgtagatgctctcccaatgtgcctcctccaaaaccgagagaaagacggccaacaatgtgccctcccccactcgggccggagtgagacctcttacctcaatccaatgggggaggaggggtacttatacatccgagagcacatcctcatcaagcttgcaacatctcttttccttcttgagctttgatcctttcctcattttgccacacacatccaagcttttccaaaatcctacacataacaatccaaata

SEQ ID NO: 5747 - DNA, 384 bp, Lilium asiatic
gacgaaagctaaggtagagaagaggttgggtaattgctccttggagtaatagttgatcgagggcgattatggattgaaatcaagatttcctctcagattgctgttttgatggtaaagcggccaaagagtgtcttttcataatacccgcagtcagcacctatttttcatgccattgtttggttgcgtatacagagttaacgaagtccttgttttatttaacttgtgcattatctgcacgcttctggtttacttggtgtagtatctgtattgttgctccttaattctcagtttggtagggatgaaccattttatgtctgacaactgcacctcattaatcacctagattgatctctggtgtaattctctatttacactatttaactt

SEQ ID NO: 5748 - DNA, 439 bp, Lilium asiatic
acgaaaaaaaaaaaaaaaatatataaaaaaaaaattataaaaatttaaaaaaaaaaaaaaaaaaaaagtaaaatgtgaaatttctctcaaaaaaaacaaactttaataaacaaatataaaataataaaaaaactttctattatttaaaaaactcggccgccctttttaagttttcaatttttttttcccttccatttcaaatatttttttttttttttttaaaccctaaattaaattccttccccccaccttaaaacttacttattttgaaaaacctttttttctccaactttattttctttgtaaaatatccccttttcatagcattgttttttacaaaaaatattccctccttttttttttttcaaattatttctccttttatttttttttttaacacctcttttatttctcctttttttttacatttttttttttt

SEQ ID NO: 5749 - DNA, 364 bp, Lilium asiatic
  modified_base (283)..(283): a, c, g, t, unknown, or other
cagctctctgacgctcgatcgttgaacgatggcggagggaaagaagatcactctgaagagctccgatggtgaggaattcgaggtggaggagatagtggcgatggagtctcagacgatccgccacatgatcgaagacgattgcgccgagagcggcatccctctccccaacgtcaccgccaagatccttgccaaggtcatcgagtattgccgcaagcacgtcgagtccgccgccaagccctccaccaccgatgacaaggcgatcgaggacgagctcaaggcctgngacgctgattttgtcaaggttgaccagccgacgctcttcgatctcatcctggcagcaaactatctcaacatcaaaaggttt

SEQ ID NO: 5750 - DNA, 164 bp, Lilium asiatic
gtggattttgtaggaagagctgtagggtttgtgagtcctagtggtttatcctggcatgtagataacatttatgactgcaagttttaaggacaacagttacagttgtatctctgcgacgagacaatgttataatgttatggttaaaacggataaatttgtaggtt

SEQ ID NO: 5751 - DNA, 406 bp, Lilium asiatic
cccacgcgtccgcaaaaatatactgtttgtcatttcgaaaccggatgttttcaagagcccgaatgcagacacatatgttgtctttggtgaggctaagatagaagatctgagctctcagctgcagacgcaggctgcggagcagttcaaggcccctgatctgagtcatgtgatctcgaagcctgatgcttcggcctcagcacaggatgatgaagatgttgatgaggctggggttgagcctaaggatattgagctggtgatgacccaagctggagtttctaggccgaaggctgtcaaggcgcttaaagctgcggacggtgatattgttactgctatcatggagttgaccaactgatggcttttctgagagatgtcagcttcgtcttcttagcctatttgctttgggttg

SEQ ID NO: 5752 - DNA, 448 bp, Lilium asiatic
ctctcccacatatgacatttcaagatatcattgtatgcttcctcgctttcttgcctgctgggtgggggctgctcctgattgcccaagcttgtaagcctctagtaaagaaagccgggatatggggatcggtgcgtgcgctcgcccgcggctatgaaattataatggggatgctccttttcactccgatcgcctttcttgcctggttcccgtttgtttctgaattccagacaagaatgctgttcaaccaggcgttcagccgtggtctgcagattcgagtgttcttgggtgggcagaagaaggatcgttctcgaagcaaagagtaaatgggtgtttttgcgtgtatcaagaatgcatgatttatgattgatccattgatttagttgtgatattatcagccagtgtatatatgcctgaatcatatttagggaattcttggaggggaatacta

SEQ ID NO: 5753 - DNA, 209 bp, Lilium asiatic
aaaaaaaaaaaaaaaaattaaaaaatttatttttataaaaaattataaccaaaaataaggagggatatttttaaaacgcgtgcatacaacaaacaattccctttctttttgttacccaaaaaccaacttactctccctttctataaaacctcttaatctataaaatccactgttttacccaacttaattgcctttactacatccttcct

SEQ ID NO: 5754 - DNA, 414 bp, Lilium asiatic
gaattgtatcaagggatgagatgaagattttaaggaaaaaatggaacaaatgagtggggagttgaaagagaaaattgaagaaatgcatcttcttgaagctcttaacaatacccttgttgttaaagaacgcacaatcaacgatgagctacaagatgcccgtaaagaattgattatgggatttgacatatctaatagtcgcaatattggaataaaaaggatgggtgaacttgatctgaagccttttaaagtcgcatgtaaacggcgattcccataataggaagcaggtcttaaagcagcgatgttttgttcggagtgggaagatcatttgaagaatccagattggcacccattcagagttattgttgttaatggaaaacctcatgaaatcatacaagaagatgatgagaaactggt

SEQ ID NO: 5755 - DNA, 321 bp, Lilium asiatic
gtgctttgactgctctggaagctcttcaaggatacaagttcgatgacaagaaacatgatggcccatccctgaggatccagtttgccaagttccccttccgtccgcctgtccgggacaacaggaggccttgagaagaaaatattttctatgccttattatcaaaaggccattatgacaacaggaggccttgagaagaaaatattttctatgccttattatcaaaaggccattatgtcggatcaaaaccattatgtcggatagctgttgtagttcatctttaacttaataggtggtttagaattgtgttgctggtttagtatt

SEQ ID NO: 5756 - DNA, 203 bp, Lilium asiatic
acccaacaatgaaagtttctcacgacaccacctatcttcttcaccgcaaagcaataagcgaaggtttaaccttatctttacgccaccatcttcaagagtaggcaatcaaaatggagtccaattgttgagcccttcggaaatccctcgaaaggactggttcccctcctacttcatctttgttgccgccacttcatcttaccaaa

SEQ ID NO: 5757 - DNA, 414 bp, Lilium asiatic
acgcgtacggacgaaagcatcactttaccccctatatatatcactccctcagagctctgttccctctacggggcgcctgtctccaaattccggctcccaatttctcaagcgctgctgctggggtttcggcgtatgagatgcgagcatggctttcgagatctgcaagggcgtcaatgaactcgagaaggtcgtgcttaaggaggtccgcggaagctccgccgaggtgtatttgtatgggtgtcatgtcacatcttggaaaaatgaccatggagaggagttgctctttctaagcaacaaggctattttcaagcctccaaaagctatacgaggaggcattcctatttgctttccttaattctcaaatcatggacctcttgagcaacatggatttgcaggatacaagacttggagtat

SEQ ID NO: 5758 - DNA, 417 bp, Lilium asiatic
aatgggatgtgtcggaaaggggacgcgatgggggctatggggctgctaggggagatggagaggggggggtgcgagccgaatgattgcacgtataacacattgcttatgggtctttgcaaaacacagtgtttggagaaggggatggagctgtatcgggtgatgaaagatgggggaatgaagcttgagaaacccacttatgcaactgtcgttagggtgctttgccgggcaggaaaaattgcagaggcttatggcgtgtttgattatgcgcgggagagtaagagcatgagtgatgtcacggcgtaccaggagttggagatctcactcaagtggatcaagaatgcaaaggctagagatgcatgtctctaggtgagttctgcatccattgtagatctatcatttgataacttcatttggaaa

SEQ ID NO: 5759 - DNA, 350 bp, Lilium asiatic
atacgcttacacatcgcaaacaaacactatataattatccaaacttacaaacacttacattcgacaggaatatatctaatataaggtcacctaaattaacactctctttccaacactttacaacaatccatactattaaaacaccttccttacccaacttaatctccttacaacacatccccctatctccaaaaaaacctaatatctaataatccctcacctattcttcccttccaacactttctcatactcaatttctaatgttacactccctttatctactcattaacctcattatttttctttcttacccacaacgttaccccttcactttccatctccctatctcc

SEQ ID NO: 5760 - DNA, 291 bp, Lilium asiatic
cggacgcgtgggcgaggcacgtctgccttgctgtcaggaacgaccaggagctgggcggggggctcgctggagtgaccatctgccatggcggtgtcatccccaacatcaacccggttctcctccccaagaagactcttgagaagggtgattctgctgcaacaaaatctcccaagaagacccccaagtctcccaagaaagctcccaaaacccccaagaaagcgttgtaagatcagctaggtgctgaatctgtatcagcagtaaaattgaaatatttttccttaccgggcggtc

SEQ ID NO: 5761 - DNA, 415 bp, Lilium asiatic
cccacgcgtccgctcgacgacatcgattttatcaagtgtgaggttgtcgggcagagtgttgaggctccaccaaatgcggaaaatgataggacttgcagttgctataatgcggaactgcgtgccagagtccctgatggatgtagctttgagaaaagatttgaatatcaatgtgccgactgcgccggaggttgggttattcttggatgaatgtttctttacttcgtataaccagaagtggaaggactcacatgaggagctatcgatggagtcttatgccgagcaggccgaggaattcaagattaaacatatatactctcacattgcagctatggagcataaggaaagagctgtggctctgtggcttcactctttgaaccagcgtaattaccctgattttaattatcatgagtctaat

SEQ ID NO: 5762 - DNA, 446 bp, Lilium asiatic
cccacgcgtccgcacccaaagcttgaatcatgtctgggcggggtaaaggtgggaaggggcgcggcaagggtggcgccaagcgccaccgcaaagtgctgagggacaacattcagggcatcaccaagccggcgatcaggcggctggcacggcgcggtggcgtgaagaggatcagcggcctcatctacgaggagactagaggagtgctgaagatatttttggagaatgtgatccgtgatgctgtcacctacacagagcatgcacgccggaagacagtgacggcgatggatgttgtgtatgctctcaagcgccagggacgcactctgtatgggttcggaggctgatcttcttctgcactgggatcgactgtgggggtatcgcttgttgttaggagtacatcttgttttctgctgtgagcttttgttggatcatgtttttaagtatgaaat

SEQ ID NO: 5763 - DNA, 387 bp, Lilium asiatic
tgaatgagaccaaggcaatggtgaagtttctactgaagaatgtgctgtgcatgggtgttggggttggagactgtgggatggaggacaagcacattttccagaatgtgcaactcagcgtcaacttcctagtctctctgctgaagaagaattggcaaaacgttaggtgcttgtatctgaagagctctatggggaagccaactcgcatcttttgagctgtcctagtagattacttggtttgcagcaacattttgtgggagaacttgacttttgtttttaattattatttgctggaatctcaacttcaattattctatttgtagctgcgtctggattcctggcttggattaagtcttttgttgcgttgtgcttattttgagaatttgcttt

SEQ ID NO: 5764 - DNA, 199 bp, Lilium asiatic
cgcgtacgctttattttgtgaaaaataaattatagttattattattattgtttaggttttttaaaagaggaaccctgtaggttacatgaaaaataatcttttggaggggtaattacaaattttgaaaatatttatgaggcaattacaaatttccgaaaatattttgagtaaaaaaaatataattaaatattaccatacc

SEQ ID NO: 5765 - DNA, 438 bp, Lilium asiatic
acaggattaggctatcggttaagacattatctaagaaatccagtagataacttcggattgggttgacgtaagattgttagaaaggacattagtgtttcattaaaccagataatgttacagtcttagttaggatataagtgtaacctcataattaacgaactagtattttagatcatgacaaaccagataacgtaggttatttcagtacatttcctcagaatatgaaacctttttcagaactcatcataactttgaggtacgtggactacacttttaatataacagtttttcaaaatttataggaagtttttcaaataactcagtatatttcattaagtctgacataaaaaagttattctattgcatagggactatgttgaccaagagggtgagcagtcaggacgtacagaacttgatcacgatatacatcacgaacct

SEQ ID NO: 5766 - DNA, 326 bp, Lilium asiatic
cctcatcataatctgcctcctttcttcgttttgaaaccttctatgaaaaatgtgacgggcgcattctattcacctgccggaaaagctctttttgtcccaatacttacccttcctgttctacatgcactgcattacattgaaaactgagagaatgcccctaatatacctactgttattggagcgccaaattatgattcaatgagccatcaatgtaaaacgattcttgtgaacatgctccctaaaatcttcattgcacataatactagctaatttgatgctgaacaagatactattgaacataagcccttttttgttattaacccaca

SEQ ID NO: 5767 - DNA, 210 bp, Lilium asiatic
tctatatcacaaacacctcccttccttttttttttttttttcattcctttttcccagtcagaatttttttaaaaattagtagccctcccccatttttctcatcttttaacccacccctttacaaccaaaaaactaacactttaaattcaatccattacccttctactcaccaaaagatctcgactatccaaaactttcaaccaattattc

SEQ ID NO: 5768 - DNA, 414 bp, Lilium asiatic
gtcagggtccgaggatgatgctatgacctttctagaggcagtgactacgaagaagttcccgagcccgtggcttgtatattagactttttgaggcattgctcaaagctgggaagcatgatttggcacataacgtgctttcgctgtctcctggttctgttagcaaccatgaagatgtcttgagtctgttttactctatgaggctgggcgaatctgatatggctgctccagtataggcatcctcatcattgttattgggtgcgggaaacatccatattttggtatggagtgaatcaataatgtgctggagggtatgtttcttcggtgaccattttgcttgaaactcatggtgggtgaccattttgcttcaatctatattttgtatgaaattaagcattatgaaagcaattttctgtg

SEQ ID NO: 5769 - DNA, 321 bp, Lilium asiatic
cggacgcgtgggtagaaaataaaaagctgaagtactgaaatgcataaagaaaataccgagagaatgaaagttacctagaaaggtaagtactgagaaaatgaaacttacctagaaaagtaaatactgagaatatgaaactaacttagaaaaggaaatactgaaatgtcgaaagtactaaaattatgaaatactgaaaaattgaaatgaaaacagataagttgagagtttcaacattactctctaggcataaagcctgatggaggagtggaatgcgagagatgataagaaacttctttctatttataaaaaaggtcgagattt

SEQ ID NO: 5770 - DNA, 411 bp, Lilium asiatic
accacgcgtacgcccacgcttccgcggacgcgtgggtgggactcccaatcctccctgaggtgctggagacgtagaataacatcttggcagagaactgtgtcgacataaactgggacaagggtgacatcttgttcatcaacaactaccattgccagcatgctcgccgcgctggcaagccgccaaggatggtgttggtttctgtggcgaattaaggtttggatgaccataacgttggtttgggtcctttgtttgatggattagtgattcatgaggtttccatccctgccaataacctcggtttcatttttcctcattggttggtattttattttgatattctgctggaagagaataaaagtgaggtcatgcataggattttagaactttattctatcaaattgtgcggatcta

SEQ ID NO: 5771 - DNA, 439 bp, Lilium asiatic
gagagaaaaagttaagactccattctatatttgtccgatcacagtgacacaggcgaaaagcttggaacaagcagcagcacgccccatttcgcgcatctttgtaaccaacccgataacaacaaaaaaattaacacttagaattcaatctcatgagttttctactcacgaaaaggggtggtatggtcaagaactgtcagccaattattcagaaaaaggtaatatagattaacacaagagagatataaagactgtctgataatctttgaaactcttgaagcacgccaatataacttctataacgagaggggcagtagaggggctgccagaaacccgtaaactgctacatcccacatctaagatgacgcgactgaagctccaaccctgtcgcgaggtataaggcgcagctccgatccgtgtttaagaaacacattacctgcac

SEQ ID NO: 5772 - DNA, 367 bp, Lilium asiatic
gagcagctctcaaccgtccgaacaagatggggaagacccgtggtatgggagctgggcgcaggctgaaaactcacaggaggagacagcgttgggcatacaaatcctacaagaagagccatctcggaaatgagtggaagaaaccatttgctggttcttcccatgccaagggcatcgtccttgagaagataggcattgaggccaagcagcccaactctgccatccgtaagtgtgccagggttcagcttattaagaatggaaagaaaattgcagctttcgtcccaaatgatggttgcttgaactacattgaagaaaatgatgaagtgctgattgctggatttggacggaagggtcatgctgtgggtgatat

SEQ ID NO: 5773 - DNA, 398 bp, Lilium asiatic
cccacgcgtccgggggacagtgccgcccccgtctacaagttcctcaagtccagcaaaggcggccgctttggcgatagcatcaagtggaacttctccaagttccttgttgacaaacaaggcaatgttgtcgaccgctacgcgccgaccacctctccactgagcattgagaaggacatcaagaagctgctgtgaacatggataccaaagagtggatgataataataataaaaagcagctttgataagagaactttagcgttgctctctgagtctgcttgcagctaaaactttcaggtgtaccctggatctactgtttgcatggttgtagttttatcgatgactaaataagatgtttgtactctttacttatttaccaatgcatttaccaggttatatttg

SEQ ID NO: 5774 - DNA, 364 bp, Lilium asiatic
agcgccctggatatcgtgttggacgtcgtcgtaggtgcaagtctcgtgttggaatcgagcgccgggtcaccaaggatgatgcgatgaagtggttccaggtcaagtacgagggtgtcatcctcaacaagtcccaaaatatcacctcttaggctctcctgccctttgtcctctctttcatcttgaagttgttcaatctgttttattagcagtgtcaggatatcttttttccgcgagaatttttgttatgacctgagttttgatttgaagtattctgagtttatggtagttctgggtttatgaaaagttacttttgtaaggataatgttgtctcgtaagctgcttgttgaatgcaagatttagtctc

SEQ ID NO: 5775 - DNA, 398 bp, Lilium asiatic
taggtttcggtatcaggaacatgtgtaggctgccttctagcagggacatcattcttggtcgaggagcaaggactctacacgggtttggttccaatactggcactttcaggaatactgatcttcgttggttccttttcaataggaatgggagctatttcttgggttatgatggcagagatattccctatcaacataaagggaattggtggaagcttggtgaactgggctgcatcatgggtggtctcctataccttcaactttctcatggactggagttcctcacgtgacattctcatggttccgaaatttcttaatggagtaatgtatgtctgctagtgagtgctagtccacgttatgtgactcatacacctataatagaaggcttgggctacatgtgc

SEQ ID NO: 5776 - DNA, 421 bp, Lilium asiatic
acgaggaggaggagccagatgagatgacggtggtcaaggaggatgatgatgacgatgatgaggacgatgacgggggtgatgacgacgacgatgaagaggaggatgcggatgagatcccggcggggaacgggccgcaggtgcatgaggtggatgatgatgatgaggacgaggatgagccggaggagggggtgagcggcggcggagatggtgggagcgacgacgacgatgatgacgacgacgatgaggatgatgatgaggaggatgtgggggcagattaccttgcccaacctgtagcgcatgctgtgaacgaggaagaggcaagtgacttcgagaccggcgatgacgatgatgaggatgataactctgatgatgatgatgacacccctgctggaaaggataattctgtgaaaaagaagagagc

SEQ ID NO: 5777 - DNA, 334 bp, Lilium asiatic
agcgaagagcgggttcatccatgcctaattatcgtaaggaagagtacaactggaggtatgataatgaagacatttcagaggatgtaattcgaacttcgaatgcgttggaaaacattcagttggacaggaaagcacggaatttgacctcatcttggaggcatgtgaatgatggcattgtggaggatgatggcaaagcagaccattaaggggcatttgtggttgtgttgttgttagattgcggtaattttatttgtgtcaagtcttttactggaattagattgttgagattttgaggttattatgtaatgtgtgtttggtatttcagtggctttct

SEQ ID NO: 5778 - DNA, 377 bp, Lilium asiatic
cccacgcgtccggtgcttaccagcgattcgttcgactggaatgtgagtgacgagtcaccagggaggcatgtcctcatctacagaggcctcatcccgctgctagcggagggttctgccaaggcgactgatgcggagtcgacagaggtgatcttggaggctgcactcaagtcagcgacggcgaggaggctgtgcaaaccacgtgactctattgttgcgctgcatcgcattggtgttgcttctgtcattaaaatctgcatagtgaaatgataaatcaatgagacccggcgactgtctgctgggttgctgctatttttatgaacgaaactcacttgctttgttatgcataaacagttatgacaaaactactttgtaggtat

SEQ ID NO: 5779 - DNA, 451 bp, Lilium asiatic
cccacgcgtccgagaaaaatggctgccgagaaggtgatcgccgtccacagcgttgatgcctggaccgagcagctgaatcaggccaaggaatccaagaagctggtggtgattgatttcactgctacatggtgcccaccatgccgtgcaatcgcgccatattttgctgagctggccaagaggttcctcgatgtcattttcctcaaggtggacgttgatgaactgcagtcggtggctcaggactgcaaggtcgaagcaatgccgacatttattttcatgaaggagggccagattgtgcacaagatcatcggtgcccatagggaagaaattgagaagaagattctacagtacgcctaagtgatgatcattctgtgtttatgcatacagaaatttgatcatgaaatctatgtttgtgtgtaataataagtatccccgtgatctgttagggatttgg

SEQ ID NO: 5780 - DNA, 437 bp, Lilium asiatic
gacgtcctcggacgggttaccgcggggtaatggggacctttcatcgctttcccctgccccgtatgtgttaggcagtgggatgaggaggaagtctggtggggtggagaaagtagttgaaaggaggcagaagaggatgatcaagaacagggagtcggctgcgagatctcgggcgaggaagcaggcctacacgatggagctagaagcagaagtagcaaaacttaaagagcagaacgaagaattgatgaagaaacaggcggagataatggagatgcaaaaaaatcaggttctggagttgatcagtgatcaacacgtggctaagaaacgatgcttgcgtaggactcaaacaggcccctggtgaagttggaacatttcgttgttgaaatcaagcttggcagtgaaatattgaacttcagaattcatatttgacttaatttctc

SEQ ID NO: 5781 - DNA, 446 bp, Lilium asiatic
cccacgcgtccgccgccggaccagcagcgcctgatcttcgccggcaagcagctcgaggacggcgggacgctcgccgactacaacatgcagaaggagtcgacgctccatctcgtgctccgtctccgcggcggcgctaagaagaggaagaagaagacgtacaccaagccgaagaagatcaagcacaagaagaagaaggtgaagctcgcggtgcttcagttttacaaggttgatgattccggcaaggtggtgaggctgaggaaggagtgcccgaatgcggagtgtggtgcggggacgttcatggcgaaccactttgataggcattactgtgggaagtgtgggctgacgtatgtgtaccagaaggccgaaggtgagtaagctggcttgctcgttttggtggtttagtttctgaaagaacatcgttgtgttggcattcagcttcaagtctg

SEQ ID NO: 5782 - DNA, 435 bp, Lilium asiatic
caattatctcatttcatctcgaagagagctgaagtaatggagtccggaaagatagctaagggcgctgcgggccgcaagggcggagcaaagaagaagtccgtcccaaaatccatcaaggctggcctccagttccccgttggccgcataacacgcttcctcaagaagggccgctatgctaagcgcgttggctctggcgctccagtctaccttgccgctgttctcgagtacctcgctgctgaggtgctggagctggctggcaatgctgcaaaggacaacaagaagtcccgaatcatcccgagacacatctgccttgctgtcaggaacgaccaggagcttggcaagctgctcgccggagtcaccatctctcatggcggtgtcatccccaacatcaacccggtcctgctccccaagaagtctgctgagaagactgattct

SEQ ID NO: 5783 - DNA, 79 bp, Lilium asiatic
acggtagagacaaatggagtctgatgcacttatttgcttcttgtaatcactcactgtggaaaagcagtgttgtatttgt

SEQ ID NO: 5784 - DNA, 357 bp, Lilium asiatic
gattgatgaacctccagttacaggcttgtaccatactggaggtggaggtgatagaagctgggatatccggctgtactatgctagaaatcctgaatgtccactcttgcccaaagatacatggtgcgcacgtggtggagagatttcgcatggcctgccccagtctgaaacggatcccatacagcttgttggcatagtgtgagtgactggtgcagcttctacccatcaaacttaaaataatatatagtggatatcgggctctcttgcaggacaaccctttcttctgtttccgcccatatttctattatagtgttacttgagaatagctaagtactgatgcagacatgtatacaataaaca

SEQ ID NO: 5785 - DNA, 74 bp, Lilium asiatic
ttctataggatccaagcttacttccgcgtgcatgggacgtcttagctcttctatagggccacctaaattcaatt

SEQ ID NO: 5786 - DNA, 381 bp, Lilium asiatic
ggcggacccacgcgtccggtttggaatgaactcatcggtttgaagtgaaacggcgtagcatataaatgtcgggggacggtctcacttcatcaacttcaactaaacagatatcagactaagacaacatagtcgaacagatagactaagacaacatagtccccaacggtcgaaaatcaccatcaaactaagccacaggatagactctaacctggtcgagcaccggaccacacagagctccagcatcatcatcaatcctagtatggtagtttgaactatagaaggtgatcctcgttgtagctttaatcgcttgaaacttcaaagctcctgtagtaaaccctcctttactgtgagagtcataaggaactttcaaagttgcattgc

SEQ ID NO: 5787 - DNA, 111 bp, Lilium asiatic
  modified_base (13)..(13): a, c, g, t, unknown, or other
acccacgcgtccnactagttctagaccccagccgtccctctttaagatccaagcctacctacccgggcctgcgaagtcattacttttcttttggggcacctaaattcaatt

SEQ ID NO: 5788 - DNA, 345 bp, Lilium asiatic
ctgaaagaaaatctttgtgtttgtctatgaggtatgtggttgtggaagagatgagctgagtttattttataccgatcgtctctccctcttctggttcacattctccttcatcacgtccttatgtttttcttctccttcgacttttgaagctgcctattctcatactctataatcgatctttagggacatccccctctaggatccacgcttacttactctttcctcctacatcatatctcttctatagcttcacctaaattcaattcatcttcctgagctctacaacttcctactaataaaaccctgtcttacccaacatattctaccttcatcatatcccctttt

SEQ ID NO: 5789 - DNA, 407 bp, Lilium asiatic
gcgtccggcattgcttaacttcatttggatatattttactaaacttcgcaccaatcacaggattatggtaatattgattagccgggggcgccatcctctatcctgaatattactgcatgaatacatttcgacctctacatataaatcttacatatacttattccttacgtaataattacattttacaaatactaactattttaaaccattaaaatacaattcccctaccaaattatatcaataaaaacttcttatgaaccttgtacccccaggtcaaaatacatctctacatatcttcataaaaaaaaaaaggagccactccctctaaacgatccaagcttacgttctcttacctgcgacaacatacatcttttatactgacacctaaattcaatttcactcgactt

SEQ ID NO: 5790 - DNA, 289 bp, Lilium asiatic
acctgtttttggaagtttatgttaaagggcacacatattaacttggaaaggggggggatgtagaccgaatgtatattatttcagttcgatcagtgatcaggttgaacagaagttcaaccgtgtgtatagaacgatgctccgatctttgacaagatgtaataagtcttgtttgttcccccctacccctccccccctattctttgttatgtaatccagatgtacagtgacatcagctgctagagtaattgaagtatgttttaatcaattcttaaaatataatgttctgtta

SEQ ID NO: 5791 - DNA, 351 bp, Lilium asiatic
cccatggttcaaattcaggatctcccaacaatgtagaacagatatcggggctggatgaacatggagaaggaggcaggacatattcgtggtaattgcagcaatgtagaacaaatgtcggggctcgatgaccacggagaaggaagcaggatggcaggatgaaaggcgtttcgaggccaatagagaataatacattccttttttgtgtagagcaacatgttgtgtattggcgcatgtatatatgagaggaggtatattgtgcccgtaaatctagaacccaagtaggaaggcgatgttggagatgtactgctagcacaacaagctattgtgatttcaacggattcggcgatgttc

SEQ ID NO: 5792 - DNA, 330 bp, Lilium asiatic
gccacgcttacgtaacatcttcccagatcatggaccatggacaagcgcgacggaaatatgcagctgggaaagtgctctgcttgttctactagatcggcgcgttactgagaggatggacttacacttagatgtctatctgagtctcgaacttcacatctgcgacttagcaactctggattgtactttgcaagcgttttacatgcttgagcaggatactcagatgcattatctcctaaatgaaacgattgggactgcaactggaatacaaaggggcattttaaaatggctgccaaatttataggatccatacctacatacgcgtgcattcca

SEQ ID NO: 5793 - DNA, 349 bp, Lilium asiatic
gtttgtaagcctgagttttattggggtttggtagtggcaggcgattatttcgcttgccatgacagcctagttaggttgttttttatgaccaagccctggttttacaggctgatagtatgaactgtgttctttgtgacctatatcgtatggaataaaataagttgttgcggtatcactttgtatttcagaacatgttgtgcatgtagtagcttgtctcttaaatgcatattagaaaaaaattgtgatatccagacctgtaatgtagtagcttatctcttaaatatatattagaaaaaaattgtgatatccaaaaataaaacgtgtttttggtttcgttcctttctttttt

SEQ ID NO: 5794 - DNA, 60 bp, Lilium asiatic
aaaaaaaaaaaaaaaaaaaaaaaaaaaaaaaaaaaaaaaaattaaaaaaaaaaaaaaagg

SEQ ID NO: 5795 - DNA, 265 bp, Lilium asiatic
cccacgcgtccgccacatctgcggggatcatggaccatgaagaagctagaaggaaaaatgttggtgggaaagtactcggctttttctactagattggcttttactgagaggatggacttttcctttcatgttttcctgagtcttgaatttcggatctgagacttagaagctctgttttgtagtttgctgttgtgatacatgcttgagtaggattttaagatgaattatctcttaaattaaactttgttggtggcgtttgcaatta

SEQ ID NO: 5796 - DNA, 317 bp, Lilium asiatic
cccacgcgtccgaagagtggtcggttgcagagtgcaatttcaatcttatccactctcttaggtattgttccagactgcttggactcccttgcaaatcttggcattgcatatcttcaaagcggtaatttggagcttgcagaaaaatgctttcaagatttgattctaaaagatcaaaaccatcctgcagctttaaccaactatgcagctgtccttttgtgtaaatatggatccattatccctggtccaggggctaacgcaagtgatcaggcctacttacatcaagttgaagctgcaactgttgccaaagagtgtttagt

SEQ ID NO: 5797 - DNA, 265 bp, Lilium asiatic
cccacgcgtccgccacatctgcggggatcatggaccatgaagaagctagaaggaaagatgttggtgggaaagtactcggctttttctactagattggcttttactgagaggatggacttttcctttcatgttttcctgagtcttgaatttcggatctgagacttagaagctctgttttgtagtttgctgttgtgatacatgcttgagtaggattttaagatgaattatctcttaaattaaactttgttggtggcgtttgcaataa

SEQ ID NO: 5798 - DNA, 206 bp, Lilium asiatic
ccaagccttcggttctagattgcgagtttacactgtagacgatccatgcatacgttggcgggcttcctacgccttagtgctactatagagctaccttatttcaattcactggccctcgtctcacaacgtcgtgtcatttaaatccctcgtcgtaacacaacttcatcacctagcttaatatccttgtatcacaagcttgcgttata

SEQ ID NO: 5799 - DNA, 311 bp, Lilium asiatic
tgaagaggaagcgccgaaagatgaggcagcgatctaagtagatcctgatgcagtggccttcatcaagtggaagatagttgattggtctttcatcttgctgttggtttctctgttaatgtctggccttaaaatgcttaggcatctaaatttcctgttttgcagctttagtatgtcctaagacttcaaatgttatgctttttgttgactatgtgtgagacaatggtgttgaaccatatttgatctcttttgagatgtttaatgttgaagggtagttatttctagattaatttagtctattgtcttgtctgcaa

SEQ ID NO: 5800 - DNA, 375 bp, Lilium asiatic
aagcaatgccaaggatgagaaaaacaatgataaggcggctatctcagataagaagtcaaagaagactgatgataagcagtctgtgccggagaaaccagtttctgtggaaccggtagttgtaaataaggagctacatcaggctttcaagtttttcgatcagaaccaggttggctatatcaaggttgaagacttgaggtgcataattcacaacttgggcaagtttctgtctcacagagatgtcaaggaaatggtgcaaagtgctctttttgaaagcagctctgcaagagataaccgcattttttacaggaagcttacatcaatggcagtattaatttgatgcaactggtcatgcaaagggaactcggaatttggttg

SEQ ID NO: 5801 - DNA, 350 bp, Lilium asiatic
gatctagagcgggagctgtcgatgttgcaggttcacgctcacgtgcgcgcgactgcatcgggatagtattgcgatagcgacacccaaatcaaaggccgtggccgtacaacgacaacgctgggactgccctaacgttgccgaacttaatcttaatggagtacgatgcacatttcgctagctggcgttgtcgcgataaggcccaggcccatagcgatcgccaacagcaacacatgctcaatctggattgggactcgcactctagctgtacattaagctcaagcgctgtggttgttacgctcacgctcaccgttacacttgcaattgccatagcgctagctcctgttgctttc

SEQ ID NO: 5802 - DNA, 220 bp, Lilium asiatic
cttttgctcatggtggagttccgccgaacatcaacccggtcctgctgccgaagaagactgggaaagaaggggcggagccgaagtctccgaagaaagctactaagtcccccaggaaggcttaagttgttgaattgattctggctttctatatgtaatctactggattaccttggtttggaatgttggtgcaaaatcgatgcttaaatgttatcttcttaga

SEQ ID NO: 5803 - DNA, 239 bp, Lilium asiatic
cacctactatctttcactgctcagacctgacggacacccaggtccttataggagatttcagcctttcgacaaggggagcagttcagtagtccagaatgattgcctgcattggtgcttgcctgggcctatagatacatggaatgatttgattatggagttggtgatcaatcagtaatctttgatgtgcagttgcgagcatatgttccagaactttttaaataaaatggaattagatgtca

SEQ ID NO: 5804 - DNA, 110 bp, Lilium asiatic
caaaaacacaggcgaagcaatctgataattacaaaaacaacatacgcaagcatgcaacgcaatagctaatatataagagaaacataaaaacaattcactggccagcagaa

SEQ ID NO: 5805 - DNA, 297 bp, Lilium asiatic
tacatctatgggttgagaagttttaacaaattactcaatatagataaaggatgaagccaagggttggtcattctatcttctcggctgtcttctattctgaacttctcaataagagactaaaatctcaagtactactcggattctcataatctgcgtaatataattcgtagctaccaatatataccttacatggttcgttataaatgaaatacttatttgttaattatatcttgtataacatctcttttaaatttttttttaattgtgcgtccgttctataggatcctagctttactt

SEQ ID NO: 5806 - DNA, 387 bp, Lilium asiatic
ccaataccccctgaggtgctggagacgtacaataacatcttggcggagaactgtgtcgacatcaactgggacaagggtgacatcttgttcatcaacaactatcattgccagcatgctcgccgcgctggcaagccgccaaggatggtgttggtttctgtggcaaattaaggtttggatgtccataccgttgatttgggtccttcgtttgatggagtagtgattgatgagcgttttccatcccagccaagaacgtcggctttcattgattgaactcttttcctctttggttggtattttattttgattatctgctgggaagaggaataaaagtgaggggatggataggaatttaggaacttaataagggtccatttaaatttgaaggga

SEQ ID NO: 5807 - DNA, 230 bp, Lilium asiatic
aaaaaaaaaaaaaaaaaaaaaaaaaaaaaaattaaaaaaaaaataaaaaaaaaaaaaaaaaggagaaaaatagggaaaaaaaaaaaaaaaaaaaaaaaaaaaaaaaaaagggccgccctttttaaggatccaagcttacttacccttgcatgcaaagttataacttttttatagggtccccaaaattcaattcacttgccctcgttttaaaacgtcataactggaaaaac

SEQ ID NO: 5808 - DNA, 442 bp, Lilium asiatic
taaaaacaacttttatatttcttttccttataactttaataaaatattctactcgatatatagatataaaataaattatgattgtaacttctctcattttatacatatttgaatttacaatatttttttctcaaaagaagtattaaataaatacatagtgtatacaaagacttctggtgataaatttgaataatctttgaaagatattgagtcattcataaacacaagtgaattgatagagggtcagttgttcttacgccaaccatcccttataatgaaataaagttggaaatttcttcttcttcttacccatcctaaaatttttcccatttcataaaaataaatcaaccattcaagaaataaaatggttgaacaaaatataaatagtaataaactaggtggaccaggaaagataatggttcatgacttttataggataata

SEQ ID NO: 5809 - DNA, 305 bp, Lilium asiatic
gcttcagaaacaacaccactgaaaccaaagctctgaatgacaattcttactgcattaaaccatagttctcaaaggataaataaactgaaagggtagagttaaaactagggacactgatatagttgcttctctagatcaactttcagtttgttctctcagacgacggatggtgctactcacagtgacagcacttggagtggtgaaagtataagcacccccaggcttcaaccttccgcaatctttgcaaccccaaattcctactggccttcttttcacagaatactttccacaaaacttacagaaat

SEQ ID NO: 5810 - DNA, 357 bp, Lilium asiatic
tcggaggggagcactgcctttaccactatgatcatggggtttgctcctgccaaaggggagtgtgaggggtttgagatgtatgctgaaaatggtggctgtggctgcaagtgtggtgataactgcaactgcaacccctgcaagtgtggcaagtgatctcttcatggagaaaaagatgtaggggttgataccctttgtttacttgtttctgctgtagtgctgaataatggccatgggtttatatgatgcaagtctttttgcaccatgagtgggtgatcaccaatggcttaatgtcttgtggtggtgctgtgttggctttgtatggtctgttgaaattactgaaaagttgtttttagtgtt

SEQ ID NO: 5811 - DNA, 311 bp, Lilium asiatic
ggggaggatgcggtgccggatgtggaagagctggcagggatcctgacgagggctgtggagggtgggggaacggagagggagaaggtagcggagctgagactgaaggcggcggaggcggtgttgaagggtgggagctcgtacaatgatatggaggatttggtggaggggttatcaaacaacaaatctaaagatgcgtagcttttacatatgaatatgctaaaattgtctgtgactgtgagtccccaacatgtcattaaaaaaaattattataattatggaaactaaataatagagatctgctctcgtaaaaa

SEQ ID NO: 5812 - DNA, 153 bp, Lilium asiatic
gtttattgtagtcttaaaaaaaaaaattttaaaaaaaaaaaaaaaaatggcgaaaaaagggaaaaaggtcgggcgctctagaggaaccaagcttacttacacttccatgcgaacccataacttttctatagtgtaacctaaaattaattcact

SEQ ID NO: 5813 - DNA, 277 bp, Lilium asiatic
gcaaatgctagggtatatgtattgtgtaatgggtaaatgtcaaggcatatgtattgtgtatggtttgcatggatgtggtattatcttgttgattgattacttatgtttatgagtattgtatgaggtttgcttattaagccctaaaataaactctatcttctcgtgtttgagggaaaaaagaaaaaaaaaaaaaaaaaaaaaaaaaaaaaaaaaaaaaaaaaaaaaaaaaaaaaaaaaaaaaaaaaaaaaaaaaaaaaaaaaaaaaaaaaaaaaaata

SEQ ID NO: 5814 - DNA, 67 bp, Lilium asiatic
atccaagcttacatacgcttgcgttctgggtcatatctcggtatatagggtcacctaacattcaatt

SEQ ID NO: 5815 - DNA, 85 bp, Lilium asiatic
gtgagcggccggtctacaggatccaagcttacatacgcctgcatgcgacgtgatacctcgtggatagtgtctcctaaattcaatt

SEQ ID NO: 5816 - DNA, 228 bp, Lilium asiatic
cggacgcgtgggcggacgcgtgggcggacgcgtgggcggacgcgtgggtcttgacagacgtgaagagtgtgaaactctgtgagaataaggttggtaggggattacttgataaaggtcaagagtttgaaacttggagagaacaaggttgttaggggattaccttaacactttattatcccgagcgaaaattagtcaatatgtggacaaactggtgtaggaaattccgct

SEQ ID NO: 5817 - DNA, 454 bp, Lilium asiatic
tataatttcaattcagagtttttaattactttgacccgatagatcgtagtgataaaatgtagtgataaaataagtaataatgcattggttgattgtatcattaaccatttattttttttgtacgaggaacttactatgaatccactgatttctgccgcttccgttattgctgctggattggccgtagggcttgcttccattggacctggagttggccaaggtactgctgcgggccaagctgtagaaggtattgcgagacaaccagaagcggaaggtaaaatacgaggtactttattgcttagtctagcttttatggaagctttaacaatttacggactggtcgtggcattagcacttttatttgcaaatccttttgtttaatttaatcctaaaattagaaatgtgaaaacgtacgttatgcgcttctttcttagtcttagtttattttattaac

SEQ ID NO: 5818 - DNA, 369 bp, Lilium asiatic
catatcgaaggtgctgttatctatttgttcgcttctgacggaccccaacccggatgatccgctggtgcctgagattgctcacatgtacaaaactgacagagccaagtatgaggctactgcccgttcctggactcaaaagtatgccatggggtgagattactggtgttaacatggacagcagacacatcccgcatctgtcagtaaggccaggattgttatcctgtgtcaacatatattcggatctctgttgctgcctgttatatgtttatgcttcccgtgaatgctttttatgcgtgtcttactatgttgagcttaagtgtctttctatgttgagcctgagaggatgcataccgtatattacagaaaata

SEQ ID NO: 5819 - DNA, 229 bp, Lilium asiatic
gtgatataatcacaagcttatgttttgagcagcgagaaaagattgctgctatcttttatgtctccatttctcaatgctttagagaaatgatggaactatcaatgcctactaggggagttttcagacttttatttattctgttgtcataaataaatacttgcatcgtgttgtgtgctttttgttcaaatttttggcatatactatataaatttgcttaatgtgttgcaaa

SEQ ID NO: 5820 - DNA, 106 bp, Lilium asiatic
tacatttctgaagtgtggaataattgtggtgtgcaatgttggccaccattgagtctttatggttgaactattaagtttctttgaattaaagcatttgtttcgagct

SEQ ID NO: 5821 - DNA, 68 bp, Lilium asiatic
tctataggatccaagcttactacgctgcgtggacgtatagctcttctatggggcacctaaattcaatt

SEQ ID NO: 5822 - DNA, 454 bp, Lilium asiatic
tactctaataggtcacgactcctacatcaccgacaaaagccccgcggctttcacgacgtccataccgtggatccaatgccaatcgtaactcaggccagccgaccaagtcattcgatgtgattatcgctcaacttgaagcaacgataagttttcccacggctcgatacttcgtgcctcgacccgaaggaaaaagggacaaactattgatcctaaaatccaccagtacctaatttttctatccagctcagcaacatgtcagcccgaccacaaacctcggtctcacatcggcctagcccgaactcaggcccataagttagaaatatgcatcccggacaaatatgtatctcgaatctacaaatatacataccatcatgtaatatgcatgtcaaaagcttcatcccagcctcaatcatttcggatagatttcataaccagctgcctggacacatgctac

SEQ ID NO: 5823 - DNA, 349 bp, Lilium asiatic
attttgttttgtttctgcatctaaacaaaatggggtaaccttgatggtgtagatatagtctagacccttagggcggggtggagatttgaatttcagttttcagtggttgcgaatgttttggaagtggtagtagtttgttgggctgggaattttatctttttccttcctaccctagtgcatgtagcagggagctacatgtaactggcattgatgatttgttgtatgcgactttggactggtgtatgataatgtaaattgaggttggtgagtttgtaattaaagatccttgaaatgtggaagggtctttggtagtaagagattttgttgaatgtgagacatctttgccgaa

SEQ ID NO: 5824 - DNA, 256 bp, Lilium asiatic
cggacgcgtgggattttaggatgcattgcttatatagttctaaggagataagaggcaactggcatattaagcctctaacaaaatcattgggttgcctcccagatagcgctaagtttaacgtcttcagccagacgaaaacttattatttttttgtatttttgaaaattaaattttttttttatgatttttgaagaaatgaggaggtgtagtgtgacatgtgggtgaaatgataaagattaagaaatgagaatggtat

SEQ ID NO: 5825 - DNA, 465 bp, Lilium asiatic
  modified_base (115)..(116): a, c, g, t, unknown, or other
  modified_base (179)..(179): a, c, g, t, unknown, or other
  modified_base (226)..(226): a, c, g, t, unknown, or other
tacgtgctttgccgcttctcactgggcttaccgtgtattcctttctgcgggtattgtcgatcagtggatggggctgcgagctacaatccatactgtccctgggaggtgccgatanngctatgcctcaaatgccttatcgatggtgcctgttgagtaccgaagatggcgactcctgcaanctgaagctcatgatgggaaagcgatgtctgtatcacttcttgtcatngggcatgctgagcactgagatggcaagagaggcaaacctgatgcggtttcacaatggattttcagtgttgtctgcttgcttttaatgcaaagctgcatacctaccgggcgtatgaaagtgggtctgtcttcaagtcacgcaaagctgatcctggacgttgtcaactaattatttctgggtctggtttggaattctatggtatgtggaagtgaaagccataatgaggttgagtttggatg

SEQ ID NO: 5826 - DNA, 288 bp, Lilium asiatic
  modified_base (216)..(217): a, c, g, t, unknown, or other
cccacgcgtccgcggacgcgtgggtagattttattcttcagcctaatgactactgaagactggacagattcatatatgtatacaatttttgtagcaggttagtctcttgtcacggtgattttcaaggagtatttaaacattgccctgaattataatagaaaaatgacgaacactttcaatatttatccatagctataattttcagaataaaaaaannaaaaaaatatgacattatactgatataaaaaaaatgggcggcctcttttgaggatcccagcttacgtactc

SEQ ID NO: 5827 - DNA, 331 bp, Lilium asiatic
cttaatttgatttggtactaatatcttatttctttttatagaaatctttgatctataaaaggccgggaagatcgagttgtaaagaacaagaggaatcagggggtgttcccctgaggggaaggcaaaaactatggcggtttccatgggttagggtagattagattgagagagtgagattttgagagattgattgtaataagagagtgtgagattgagtgcttttagcttcgagttctagttctcatggtgatgtaatcttttcttcatttctgcatgatttgtaaggattctgaacttatctgatgtaatattttctctgtttcgaatgaaa

SEQ ID NO: 5828 - DNA, 305 bp, Lilium asiatic
ctgacgcgtgggcgaagttgtctttgctgtccagggttgagtagatccagtatttgatgaaactcatgaaagtgggtggagcccatcttgcccctcctcttttctatgactcactatatgtgactgtgactttcaaggacatatgtctgccatttgctgatttttttgggaagttaatttctaacttctttcactgatatatgaataaaagtattgcatctttgatatgcaccaaatgaatttagtttgtttttaataaaaattttatttccttccatcattgacttaatatgcttagcatatat

SEQ ID NO: 5829 - DNA, 300 bp, Lilium asiatic
  modified_base (124)..(124): a, c, g, t, unknown, or other
ggaaaaaccgggccgaccgcacgcgtacgctctgagaggcctaacttcacggttatagttttcaaactgcgtgctatggcatcttctctgtctcattaagggagatagcaggagcaacccttantctggccacaactattgaggaaattgtactctttcgttgggtggcttgctgaataattacctgtttgcagtttaacacttggggaggtttgatcgtggtgcgtgcagcctttatagattgtaagaagaaattgtgggcatagattgtgaatcgagaactaatcataatctgataga

SEQ ID NO: 5830 - DNA, 181 bp, Lilium asiatic
ggctattggttatttaagatctaaattttgtttgacacttatagtcaactcatggtgcatgtttaggtgttactttctgagaaaccatatttatataccgaatagcgaattgtagtatgaagaagtttctccggtggattatatgtacatttgaaatttccggcagatttgtatttttttc

SEQ ID NO: 5831 - DNA, 289 bp, Lilium asiatic
ctaccaaaacccgacattccaatatctaacttgcatattacgaattagatagatatttggggtcagttattctataatttcctctgggtataaatatttttaactcaacataaaactattcatgtgatactggttaaattgaattcagttagtgcttaaatttgtaacataattgattttgtatcaaaaaaaaataaatttttataaaaaaaagggctgtccttctataagatccaagcttacttacacttgcattccacatttatatcttttttataatgtcacctat

SEQ ID NO: 5832 - DNA, 167 bp, Lilium asiatic
cggacgcgtgggctcggctctcgcatcgattaagaacgtagcgaaatgcgatgcttggtgggaattgcagaatcccgtgaaccatctagtctttgaacgcaagttgcgcccgatgcctttcggttgagggcacgcctgcctgggcgtcacgctttgtttcaagataa

SEQ ID NO: 5833 - DNA, 267 bp, Lilium asiatic
gtcttttgtgactttttcttatcttcgagacatcttaaagtcattgttgaggcttaaatggggtcctcttttttcaaataattttattagggatttaccttacaaaaaaaaaaaaaaaaaaaaaaaaaaaaaaaaaaaaacaaataaaaaaaaacaaaaaaaaactctaaaaaaccaaaatacaatctatagggggggccgttttaaagaatccaaccttacttacccgttcatgcaaagccatagtttttttataatgtaaccaaa

SEQ ID NO: 5834 - DNA, 71 bp, Lilium asiatic
cccacgcgtccgaaaaaaaaaaaaaaaaaaaaaaaaaaaaaaaaaaaaaaaaaaaaaaaaagggaaaagag

SEQ ID NO: 5835 - DNA, 306 bp, Lilium asiatic
cggatatctcggctcttgcatcgatgaagaacgtagcgaaatgcgatacttggtgtgaatggcagaagcccgtgaaccatcgagtctttgaacgcaagttgcgcccgaagccattaggccgagggcacgcctgcctgggtgtaaaagttgtttgtattaatagagagaatgatagagaaataatgattattgttgagttctggtgaattgaactcagtaacagtggggctgcttttgcctttaaaaaaaaaaaatcaaggagaaagaaaaatacaattgatagagaaaacatgcatagactaaatg

SEQ ID NO: 5836 - DNA, 89 bp, Lilium asiatic
  modified_base (12)..(12): a, c, g, t, unknown, or other
gttgatttgtantgttgttcgaaaaaaaaatttaaaaaaaaaaaaaaaaaaaaaaaaaaagggagaaaaaggaaaaaaaaaaagaaaaa

SEQ ID NO: 5837 - DNA, 229 bp, Lilium asiatic
gtttattgctattgtgaacatagtactattcctgtgaggatcctagacgagaagtggatggcaggaagtcattatgtccttaccagctaatgttttgctagaattaaacttcagtcctgttttgcctgtctgtcgttctgcagtataattactgttcagagttgttaaaagaaaaaatataacccaaaaaaaaaataaaaaaaatttggggcggccgctctagggggtc

SEQ ID NO: 5838 - DNA, 98 bp, Lilium asiatic
  modified_base (16)..(16): a, c, g, t, unknown, or other
cgacccacacctccgncgaccccttctataagatcttagcctacgtacgcacgcatgccaccacggatgtcttggagagaatcacctaaattcaacat

SEQ ID NO: 5839 - DNA, 73 bp, Lilium asiatic
  modified_base (67)..(68): a, c, g, t, unknown, or other
gcgaacccaacgtcgtccgtcggacgcccgtggggcccaatctctaataacttaatacttgctggtnngttgt

SEQ ID NO: 5840 - DNA, 252 bp, Lilium asiatic
cggacgcgtgggaaacaacatcgacactgatcattgttgacacccatataagtaaaagttacgtttattaccacctaggcgaagatcacaaatcagagccgacatttataggacaagatcactgctccattcacatcatctgcaggttacctatatagacttttcaaagggaccaagccgcttatagttcgttaatgttctgatgtgtcaaatactctattaactgatacaaaggataatcgtcaaacccat

SEQ ID NO: 5841 - DNA, 316 bp, Lilium asiatic
atcctctggtggtctcactaacggtcaatgcagcgaggaaagagtctgggatccgctgaagacaggcggagtgggcttgccttcagcttcagttccgaaagctagtgtatgcttctgaaaacctgatgaggtatgtgattctagtgttatattctagtgttacatttggagtgttatgcatgctgctacttgtgtgggatggcatgtttttactgttggtgttgagagatctgcaaataaaaacaaactggaaatgctgatcaatgttttcaatgaattctgaattttggtaaaaaaaaaaataccaaaatgctct

SEQ ID NO: 5842 - DNA, 425 bp, Lilium asiatic
  modified_base (376)..(376): a, c, g, t, unknown, or other
taaagctcggcttaggattatgatgaatacgaagctcgagaagagaaaaaatgaagaagaggacaatcaatttatggaattaataaatgttcggattgggatttgaagaagaaggcaagttgggaatgagaataaggttgaggcacagattaggtcctcctgggctataaaaggggaagccgcaggaggcagaagaaaaagtgatgagctgtgatgaagaatccttgaatccacctaatttttgttcatgaattgacgtttagcccctttaccttgtgagatcatatgtgaagttggtgatcaagaagttgtccaaggagttccagtgacgtaattacaaggtccttcagctctacattcagtgagttcatattgntagtgtgtgatgttataatgaattaccatatgatttcttgtcaagaatg

SEQ ID NO: 5843 - DNA, 64 bp, Lilium asiatic
cccacgcgtccgaaaaaaaataaaaattaaaaaaaaaaaaaaaaaaaaaaaagaaagggaaaaa

SEQ ID NO: 5844 - DNA, 391 bp, Lilium asiatic
gcggctgcgatccctaatcctcagcctccaaacggagtccgccatcctcgagcggcgcgtatacaagaacaagaaccagcaccgtcgctgcccctacttccaagccctcctcaaggtgaggagggatgtgaggcttctgcagtcagccggactgggagagatcctgcacgtgctgattccgatcatcgacggccggaagccggcacaaagggcttatgtgacgatgagactaaagagaaaacatcctagtggaaagcataattaccaagagcgtcttttaaggtgtgcgcgcttactgtcacagattgctgaacctatattaaaggctgcaattcagatttctttcttgcttgccaagtcatttttcacaggattttctggtacaattttg

SEQ ID NO: 5845 - DNA, 286 bp, Lilium asiatic
ggaaaagaaggcccagtaggaggggggaaatgtttacttgtgactgcaataggttgataatggtaactagctagtttgcccttttcaagtgttgtttttacttggtctgagttagtgcttaaaccctgtcgtccatgatggatgatttagtttatcaaagtatgagtgattccctgttttctttggggccgggatagcctttattttgcgttgttgtggttattatgggcatacacttaatatggcttttatcttatgttacattataaacatgctacttgagtta

SEQ ID NO: 5846 - DNA, 249 bp, Lilium asiatic
  modified_base (243)..(243): a, c, g, t, unknown, or other
  modified_base (245)..(245): a, c, g, t, unknown, or other
gtccatggcagcgaaccagggattgacggataggaaatcgctcctatgtccaaggaaaatgtggcaactccgtgatcgcgatgtttgcgctaccctagcaccatgttatgttatgacattcttgagtgatcaaactctctgctgctttttacattatgttttcatgcttttatcaatgtgtgcgacaccttagcactatgttatgccatatccttgagtatttaacagagagttctgtataananaaaa

SEQ ID NO: 5847 - DNA, 176 bp, Lilium asiatic
agaacagccagtagcaagagactatcggctatgctcctaggttgaccgactgtaagatactgttaggctagggaacagatgttgtgacagatacacttatgttgtcagtgagaggataaattgtagctaaccgaagaaaaactagtatgaaaaactattttatacactctgtcgat

SEQ ID NO: 5848 - DNA, 312 bp, Lilium asiatic
gcgcccacgcgtccggtgtagttgaagtttcatgaagccttttgcaaagaagctactccggtctgccaccggagttgaagaagagggcttggagccctctacaagaagcaatccgtgggcaatattgtgtagttgaagtttcatgaagtattttgaagtagtgtgtggttttgatgttgtaattttagtatagaactttggtgtagatcctttgagtttgtaattttgctcctatgtatgtcaagaatcaaaagaagttatgctaaaatttctccaagttatgaatgtatgtttttaaatactatcttaaaa

SEQ ID NO: 5849 - DNA, 165 bp, Lilium asiatic
aaaaaaaaaaaaaaaaaaaaaaaaaaaattaaaattataaacaaacaaaaaaaaaaatcgcgagcgggttaaaaatacatgcgccgacaacaactaaaatatacagttccctacattgtattcgctaaccattttcctcttttttcaggccccgaaattcacttc

SEQ ID NO: 5850 - DNA, 277 bp, Lilium asiatic
aagtatgctagctttttgcaggcgtaagtagttatatgtttaatttcttgttggatgactcgatctgtgttctttgctctttgctatcacaattggtagcttgatatcaaggctataaaaggggtaataggtgtcttggtacaacaacacaatggagtgcttcctatggtatcaaatattatgttgagatgaggatctcatgaagtccatcgaatagcgcatgtgactgtgcgggtgcttgctgcatggtccgacgctctagacgatccaagcttac

SEQ ID NO: 5851 - DNA, 379 bp, Lilium asiatic
caacaggctcgaagggcagtacacactcgattctgccctcaatgtcgccacccttgtgctactttgcttatcatctgactctaggtcgaggccaaccatgtccagcgtcgtgacgacgctagagcgacttcaagaagtgagaaaggacacaaggaccctcaatgccgaaaggcgagccaagtttcagaaggttggaaacagtgaccagaacaggtcgaaggatccgagcaggcaggagattcagagtgtgatggcggcttatccaagaccgtcggactcctctctatatgcttaagattgatgttaacttgtgtagatgtaacttaaaatcttatggctatgttagaattatcagtgcatgatgtgcatcttcagcatt

SEQ ID NO: 5852 - DNA, 178 bp, Lilium asiatic
caccaccgaagagaaccaaaccctagaccgagatctccgatggggggcggcaacgcgcagaaatcgaagacggcgcgcgagcgcaacttggagaagcagaagaacgccgccaaagggagccaactggattctaacaagaaagcgatgtctattcagtgcaaggtgtgtatgcaaacat

SEQ ID NO: 5853 - DNA, 315 bp, Lilium asiatic
gcaagcttctggtgaaagactcatcaaagagactctccctccaaaagatcttggagcatccgtggattgtcaaaaatgcagacccttctgggagttgcaatgagaatttctgaaccgattgagcaggtaaagatgcatctctgtgattatttgagttttggatgttagggtcctgactgaaggactagggacttctgtgttgaatataaccctattgtatttctaaagggaatataaccctattgtatggtagtcagcttagggatgtgatcgcaacaacagttaactaatctgattgctaaatatgttatcaga

SEQ ID NO: 5854 - DNA, 277 bp, Lilium asiatic
  modified_base (232)..(232): a, c, g, t, unknown, or other
cttgtcaagtactgtggtttatccgttgatgtgagttgcaagtttcatcgataataaagctgtagggaataatggtctctctttaaccttacctttggggaaggggcaattaccttcaagaacattggccgttgatcggactttcctttgatgctgtagcttgaataagtttttagagtgttgtaatcattgtcgtgattaagtaaaatttgttttgaatttggggcccctnaaaaaaaaaagagcaaccagaatgaagaatagggacgcagccctg

SEQ ID NO: 5855 - DNA, 386 bp, Lilium asiatic
aagcgagggaggcccgacgctaacggcggcatcgccggttcgaagcgagcgaaagaagcggagtccggtttaggaagcaaaacgaagccatgcaccaaatttttcagcactgctggatgtccatttggggagggctgccattttcagcactatgttcctggtggattcaaccctgttacccaaaagggtaacttgggcaacctagctcctcctccaagaaagccaatggtttctgctccccctcctggagccgcatctgtgcctactgctaagacccgcatgtgcaacaaattcaatacagctgaaggctgcagatttggtgataagtgtcactttgctcatggagagaaggagcttggaaagcctattatgccgtcttatgatga

SEQ ID NO: 5856 - DNA, 418 bp, Lilium asiatic
ttttttttttttttttttttttttggggatgtaaaatctttaaactcaaacaaatcattacagccatatcaatgtccaacttaagtacagacaaaatcttcaacagagagagaattaagcttacagaccatcaacaaattacacacacacagacggatttttaatagatcaaggggaggcccgagacaatgagtaaggacaaaccatgtgggggttcctcaatactcactgtcatacgaggttaatcccgactctttggttcaatcccaatggaggaaggatctccagttacttcgttctctggtttggttaaattgggcttgggttcggttactgagtttaagattcgtctgggaaccgcaaaaattaatatgggggggttttgaactgaactcaatcaatttggaatcccccgttt

SEQ ID NO: 5857 - DNA, 145 bp, Lilium asiatic
ggacaggaaaaaaaaggaaaaaaaatcttatgtatgatgttatcccagcttagaatctgtgtttgtttggattatatttcccttttgtcatagaataaatgaatattaataatactatcgaaagttggatgcttatgattaaaaa

SEQ ID NO: 5858 - DNA, 175 bp, Lilium asiatic
aaaaaaaaaacaataaattaaaaaaaaaaattatttaaaaaaaaaaaacaataataaaaaaggcaagcctacttacacattaaagggaggggcctgtcctcttttatggttccaactttactaactcttccttgcgacgtcttaaatcttttttagttgcacctaaattaaatta

SEQ ID NO: 5859 - DNA, 380 bp, Lilium asiatic
ctaggaactactgggatcagttgcgaaatcagggaccaaaatatgcggcatggaggagcctgataagagtgtatatatgcataaagtggccaaaaaatgcaagggggtgaggcggaggttgaaatcacccgactgatagctgacaaatttaagttaattgcctttttttacttgtctttttaggttgttttgggtggtgaagagtttgtccttgtgtttttacctttttattgaggcatgtggaagttaggggacaggattttaagttggtgagttttctattcgagagtgcctaccttgtaagtaaattttgatagtaataaatgtatcatgacttgtttttatattaaagaccgggtcagtccaattatttctttgat

SEQ ID NO: 5860 - DNA, 416 bp, Lilium asiatic
aagccatggccacctccaacttctctattgttctctccgtctccctagcggtctttggggtgctacttaccaaggcacactcgaccgataccgtttctttcaccttcaacaagttcaacccagtccaaccaaacattatgctccaaaaagatgctagtatttcatcctctggggtgttacaactcaccaaagttggcagcaacggcgtgcccacctcgggatctctcggtcgtgccctttacgctgccccaatccagatttgggacagcgaaaccggcaaggtagccagctgggctacatcctttaaattcaacattttcgcacccaacaaatcaaactcagctgacgggcttgccttcttcttggcacccgtcgggtctcagccccaatccgacgatggatttcttggtcttttc

SEQ ID NO: 5861 - DNA, 229 bp, Lilium asiatic
cccactcgtccgactacaccgcccacgcctcattacaagcatcatacttactttcacctgcatgctaccacatagctcttctggactgtcacctaaggtcaatttacctatccccagttttcaacactacagactaggaaaaccctttcattaccccacttaatcatccttccacacattcacctttttccagctatcactataacgaacatacccatacctaattccc

SEQ ID NO: 5862 - DNA, 236 bp, Lilium asiatic
cccacgcgtccgtacgtgtatgtagattcccttgatcatttcattgtacatctagggatcgtaagaatctaacagtgggtcattctctataaaaaatgctcatacaacctctacttcataaacataaacacatacacatgggcgatcgctctataccatccaagttcacgcaccatttcatccaacttcataactctcttatagtgtcacctacatctacttcattgagcgtttac

SEQ ID NO: 5863 - DNA, 160 bp, Lilium asiatic
atgggaactacatatattaatttgtacctattgactattgttcgtacactatcatcatttataatttttattaatattttgctcattattattccattctaaatacctttacaaacaattagcctactaagattgtcctcaccatagaaaacaaggcgct

SEQ ID NO: 5864 - DNA, 432 bp, Lilium asiatic
gcgaggcggagccatatagacgaagatgtgtacaaccagctggtggagaaggcgaaggaagaaggttatgatgtgtcgaagctccacaagactcctcattcagatacaccaccgtcgggcgatgaaggccccaatgacaccaagggcatatggtggatcaagtccctcttcgggaaatgaatacgaggatggacgttgcacctcattagagagtggaagtggaaaatggagagctagttgttttatgtacatgtatatgttttgagttgttatgtgttgaattacttgtgcgtggttatctcgagttactgtttgattaatatatgtaatttgtttgtatctcgggcataaaaaaaatatattaatattaaaatttattatattttaaaaattttaataataaaaagggcggccgttctagaggatccaagc

SEQ ID NO: 5865 - DNA, 105 bp, Lilium asiatic
aatttattaataattagaactttcttttttcttaaaaaaaaaaaaagtaaataaagggatttgatagaatcgtaatttcaattcgattatatagatacatagaaa

SEQ ID NO: 5866 - DNA, 388 bp, Lilium asiatic
  modified_base (375)..(375): a, c, g, t, unknown, or other
ggaagagtacaatgcatgcaggtgtggccaccaattggcaagaagaagttcgagactcttctacttgccagacctcgatgatgcccaattggcaaaggaagtcgaataccttctaaggaaaggatgcgattccttggcttgaattcgagttggagcacggttcgtgtaccggagcacaacaggtcacctggatactatgatggacgctactggaccatgtggaagctgcctatgtttggctgcactgatgcttctcaggtgttgaaggagcttcaagaggctaagactgcataccccaatggcttcatccgtatcattggatttgacaacgttcgccaagtgcagtgcatcagcttcaatgacttagaagcctgngggcttgtaggcg

SEQ ID NO: 5867 - DNA, 239 bp, Lilium asiatic
gaaaaagaattgacctgttaatctgaatttcactctggatggatttaacatctccagttggagagatgcaatttgctagtaagtgcttgtagggtgccgaagctaattgagttgtatactcgtttgtgagccagactctttttggggcttatgctcacgttttgtatcattttagaagtttattgcctatatttaccccgcaggagccaatgcaaaattttgagtagttatttcgtcaa

SEQ ID NO: 5868 - DNA, 62 bp, Lilium asiatic
aaaaaaaaaaaaaaaaaaaaaaaaaaaaaaaaaaaaaaaaaaaaaaaaaaaaaaaaaagggg

SEQ ID NO: 5869 - DNA, 282 bp, Lilium asiatic
cgaggagaccagaggtgtgctgaagatctttctggagaacgtcatccgcgatgccgtgacctacactgagcacgcgcggcgcaagacggtgacggcgatggatgttgtgtatgctctcaagcgccagggccgcaccctctatggatttgggggttgatctagcactgttctcttctcttctgggtttggtggtctctatctgatttgggttgtttcatattactggtatgaaatgaagtgtcgtcttggttagtttatgaaatgaaatatcgtcttgattaa

SEQ ID NO: 5870 - DNA, 113 bp, Lilium asiatic
tggccctccctttagagtcacacactctaaagagactagcgcgccactctcgcgctacacggggatattaacacaggcgcgcactctcaaattataaattaaaatgcgctgct

SEQ ID NO: 5871 - DNA, 104 bp, Lilium asiatic
cggacgcgtggtatgaaactacaatggtggtggaactggcaaggtaaattgttctggtgcattttctaaagcttgggattaacttcccttttttttttgggttt

SEQ ID NO: 5872 - DNA, 388 bp, Lilium asiatic
  modified_base (383)..(383): a, c, g, t, unknown, or other
caacaatgccgtcccacaagtccttcaagatcaagcagaagctggccaagaaaatgaggcagaacaggccgatcccgcactggatccgcatgaggaccgacaacaccatcaggtacaacgccaagcgcaggcactggcgccgcaccaagctagggttctgaggggcgaagccgctaggatgcagtgctttcatctgtgctgctggagctagggttatgttatcattttcctatttactgtttttataagactgttgattggatactcttgttgagacctttcatttaggagttgtgtggtgtttgtggatcatttggatgattggggtttgatattatgttttgttacatgcttatgctcttccttaattgtagcagagattntggta

SEQ ID NO: 5873 - DNA, 315 bp, Lilium asiatic
cagggagaatgttctggaagcttgcagaaggctgaaacaactctacaaatgagaaagtgtattgacaactttctacctaccagaaactatttgctacaaagaagccagacaagtatttttttttctaatgtagtcgagacttatgattgaattggtacgcctttctgcatcaaaaaaaaaaaaaaaaaaaaaaaaaaaaaaaaaaaaaaaaaaaaaaaaaaaaaaaaaaaaaaaaaaaaaaaaaaaaaaaaaaaaaaaaaaaaaaaaaaaaaaaaaaaaaagggggggccgttttaaaggatccaagtttactta

SEQ ID NO: 5874 - DNA, 235 bp, Lilium asiatic
catttaccttcgtactcgaacttgtacatgatgtttccagcagctctctgcatctggttgttgtgtccctgtgtgtaaataagtgtattctgggttccttgtcattacatttacaaacatggacacattggggattaatccattcagggcattggtatctagatccataccatgcagacatgaatatttcttatgtatgctaaaattatcatcatgcatgtcatatgttaagcct

SEQ ID NO: 5875 - DNA, 318 bp, Lilium asiatic
atcactgggccaagattgagaaaacagagatcagtgaaaattctccgaatgctcagtcatgccctttgtttcttcagtcatttgtgcggttaggtctgaggttggcttggaaggatgttcaggcccttttgttttgatttttgttaagttctgttattgttaaccagggttacttattcttgtatctgagaatcatgtttatgtaaaaaaacatttagcagtcgtattcctgtaggctgatagccttcaaactcttttagaacatttatcttctgctggttgggccttttaatatattgcttcatttatttttcagga

SEQ ID NO: 5876 - DNA, 216 bp, Lilium asiatic
ttttgaacgtaatttaacactaagcgagttgggacagggaatacagacaaatactataaaccacaatacactgcccaactgatccaccacttatatctacagctaacagtctaagagcacatatttaagacttcttctacagctaacagttccatagcacatatttaagactttttctacagcttacaagcccagagcacagatttaagccttttt

SEQ ID NO: 5877 - DNA, 319 bp, Lilium asiatic
cccacgcgtccgcccacgcgtccgtgcatatggaaactatcagcaacagcagtgatgatgttactggttttgtgcaagatggagtgaatgccttaggtgatatcggcttcttgaatcaaaagacactattggcttcttgattatgtagaatttaccctttgccaggcttagtctgttctcccactgtgatgcatagtgacgcaattttatcggttttgacttttatgtgtttttcttatctagtacccttagacaatcatgtttggtgacatgctatgaagattattaagtgtctcaaaacgaaaatagctttgaagac

SEQ ID NO: 5878 - DNA, 332 bp, Lilium asiatic
  modified_base (256)..(257): a, c, g, t, unknown, or other
aagttctatcttaaaagtaatactattatgaatatggagaaactaacagagagagtaagaaaagagttaattccaaacataccctgcccaagaagaccactaaactcccaaagtcaatcccaatcaacacatgaatttcattccgctcccaaattacgaaaagcctgtagtccccctctacttagcccctttaagtaattcatcagctaaccccaacatgaaaccttagagggcaactcattggctgataaagcannggccccccccccccccccccccccatattacccatcacaccagacttacgttatgggtagattgtgtgtcgcaga

SEQ ID NO: 5879 - DNA, 368 bp, Lilium asiatic
gaaaaggtggttggttctgagcgaccagcccttcttggttgtctttgtcaaggcatgaaccctggcatatatccctgttacgcacctcgactctcatgaaataagtgctttatgaccgagtgtctgctatgtgtatcagtacgaggagtgtcatgaaataaggactttatgtccgagtgtgtaacagtacgaggggtgtcatgaaatattatctacgagtgtttgccattgtatcagtgcgtggagtgttttcaaataagagcttttatgtccatttgtgtttgctatgtgaatcagtgtatgtcgacataaaaactaatgtttgttggtaatttattttctaattcaaattttcaactttaagttta

SEQ ID NO: 5880 - DNA, 395 bp, Lilium asiatic
gtctctatgactgtgagacacttgtggagcaagagctccctggaggggggattctgatgtatcagagctttgctgcctctcccgtgggggcagaatctccgaggtccaccctgcagcatccatgggacaaggaagatgtgatggaggagaaggccgggaaggatgagaaggcaggtattgagagtctggtattttagtctgtctgttttttttctgttgtctttatgaagcagcaagacaatctactggtatctttactagtagtctatgcttgtcttgcttgagtctttacatttctgaagtgtggaataattgtggtgtgcaatgttggccatcattgagtctttatgtttgaactattaagtttctttgaattaaagcatttgtttcgagtt

SEQ ID NO: 5881 - DNA, 336 bp, Lilium asiatic
tcgatttagtactaattcttgtctctttttatagaaagtgtggatctataaaaggccgagtagatcaagtgaagaatatcatcggggggtgttcccctggggggaaaggcaaagctatggcggttctcatgggaagggtttagattagattgagaatgtgagattcaagagtttatgtaataagagagtgagttcgagagttagcttctagttctagttcacttgaaggattgatgtaattttcttatgcttctgcaagggctgtaaggattctgaacctctcttttatgtaatacttctattatcatgaatgaatgtgatgatttactttaaaaa

SEQ ID NO: 5882 - DNA, 298 bp, Lilium asiatic
tagaaggcagttcgccgggtacgaggaccctgtgcttctttcttctcagacagctggcagcgttagcgaagttgaggcactttttgagctttttaagagcatcagcagttccttggttgatgatgggctgataaacaaggaggagtttcagcttgctttgtttaaaaacaggaaaaaggaaaatctctttgcaaacaggatattcgacctgtttgatgtcaagcacattggcgtcatcgattttggtgatcttgtccggcttcttaatgattttcatccaaatgcttgacatgaatat

SEQ ID NO: 5883 - DNA, 155 bp, Lilium asiatic
cggacgcgtgggcggacgcgtgggaaaaaaaaaaaaaaaaaaaaaaaaaaaaaaaaaaaaaaggaaaaaaaacaataataaagatgcaaagaattaaaaaaacatacatgcaaaaaaataagatataatataaagaaacctaaatttaatttaaa

SEQ ID NO: 5884 - DNA, 267 bp, Lilium asiatic
gcggacactggtgattatagggccaagatgaaggagttggagggcatctgtgagcccttggttaggaagatgtatgagaatggtgatggcttgtaatatggtggtgtctatgtgtttagcttaacttttgttgatattacagtgtccatctgactgtttagatgtgggaaaagttaattaaaaaaaaaaaaataattattattaataataattataatttattaaattgataattgttaattttctatttttaatatatttaaattt

SEQ ID NO: 5885 - DNA, 385 bp, Lilium asiatic
tatgaattatgaatatattaattatggggataagaaaaactcctatttttatggatcaacagtacaagtaaaggagaaccgggagattccatatctatataatttcaatacatcgaaacctgacgcattttatctattggtaagtacaactattagtgattatctagaggaaagatatcctattgatacgaatataaatcgggatagaaaatattttgattgtaaaattctccatttttgtcttataaaaaatattgatatcgagacttggaccaatgcacatattggtatcaagattaataaaaatactaagactcaaactaataagtataaaaacaaaatgaaaaagaaagatatttcgtttcataaagaaatcaacttatac

SEQ ID NO: 5886 - DNA, 119 bp, Lilium asiatic
cccacgcgttcggacacgcgttcattagattgtgtgcggccggtctagaggatacaagcggagggacgcgttcatacgacgtcgtagctcttctattgagtaacctaaattcgagtcag

SEQ ID NO: 5887 - DNA, 143 bp, Lilium asiatic
cggacgcgtgggcttaacataaagattttctctaatcaccatctttgttgttctaggggggctatgatatattcagattgcggacattaatcactgtgacaggaccttatgtttttagacactaattaattttaatcactaaa

SEQ ID NO: 5888 - DNA, 112 bp, Lilium asiatic
gtcgaccacgcgtccggttatacatagcgagccgtttttctaaagtaatcaatcttaccgacacgtgcatacgacgggggggttcttatatagagtcacctacattcaattt

SEQ ID NO: 5889 - DNA, 193 bp, Lilium asiatic
taaagaaccaagcaacatactctacatgctacgtataactcttctatattacacttaaattttaattcacttgccttcttttacaacattattttctgtttaatccttattctttcttatatttaatttctcttcttgtaatttttttttttttttctatttttctttatttatcattatttttttttttttt

SEQ ID NO: 5890 - DNA, 281 bp, Lilium asiatic
gctacacgtacggcgacacattttttagttttactatggaggcgaaaagtatagaagatgcgcggtgtcattcgcaggcatgccaactcatatctgatctatcggggaatcaaaaacttaagcaggggccagcgtgggacatcgccaaggaaggtggaatcctgaacttgcacaagtcatgggacgtgcagagcattaccaattggccagcgggcgtataacttaaaaggcacgcagcggacgccgttggccacaatcgcgcagtctgaatggctaatggg

SEQ ID NO: 5891 - DNA, 261 bp, Lilium asiatic
gatacaggtacagacttatatatatcagataaataaatgaaccgaaagcttattgaaaggggggtctttgtttatacgcaaaaccactcatatctgaggtgatatacaactaaattctttgttaacatagatcgaataataagacctcagctattgaatatcaacgcatgcacaaatcttgaggcgcttacaataatactaatatcttagacaactgtatttcttaagtggaacctccatatctgatcaaactatgatttc

SEQ ID NO: 5892 - DNA, 305 bp, Lilium asiatic
gataagatagagaaagggcttgcggcctttccagataggagtcgaagaacaggaacgggttatctgagtatcaaccatctaacaactggatggagggctcaccgcaaggaatccccaacagcattctatttagagtcatgaataaggctttttcaaatgctaaaataatacgaggcatgtgatccttgctagtgtgctatgtgagtttatataatatccttctcttgagatgcccgacttggctgactctatgtataataagttcgtgcattttaataagagtgatatagtgcactgttcaaaaa

SEQ ID NO: 5893 - DNA, 417 bp, Lilium asiatic
cacggatttactgaatgatttagaggctaattggtcaggagggggggcgacttaccgagatgataccgattttaatgaaagttaagtacgtccagtttgcagagttgtccgatccccacccaacacaataaatgcatgatttaaagtcttaaaggtcatgcattcatttagcagtagattcgtggtgttgtcagttaacatatggtcactagatttggtgaagtatcttgtttgatgttttcgctaaagcacggtatttgattttgccgatgtgaatcgatctggattatggttactgcatttagttatgctcatgtgaacttctatcgatatgtgcattttaaagcgggttggcactagatttggtgaatcgagcccgctccgtcttgacaccggtaactttttgtgggggagcga

SEQ ID NO: 5894 - DNA, 427 bp, Lilium asiatic
caaggaggtggatgagcagatgctcaatgttcagaataagaactcgtcctactttggtgagtggatccccaacaatgtgaagtctagtgtttgtgacatccctccgaagggcatccacatggcctccacattcattggcaactctacatccatccaggagatgttccggcgggtcagcgagcagttcactgccatgtttagaaggaaggctttcttgcactggtacactggagaaggcatggatgagatggaattcacggaggctgagagcaacatgaacgatctcgtctccgagtatcagcagtaccaagatgctactgttgatgaggagggcgattatgaggatgaagaggacgaccagcagcaggagatgtgagggaataaatcttctcgtactgatagtaggtatgctgcatggtagagttct

SEQ ID NO: 5895 - DNA, 438 bp, Lilium asiatic
tacctttctccccaagccaagttggagctccagcttctttcataatttccaatgattggtgtaatgcaatcgagagcgtatcagaagttgaagttactcgatcgattcagtcttttgctggcaatttgcatgagatgctggagaaacaaaagaaggaaagaaaccacagacggaaggcggaatacctatctgtagatctcgctagaaggctgaaatctctgcatggcaatcagggtacagttgtgaccaccagggatcctgtagcaaacaatgatgctgccatgaaagcgttggagttgttgaggaaaagattagacgaagagagagcgaagcacgaggagattgtaaaacatattcaacagggttcttccagctgtttggggaccggactggtaccgatattcgaggcattgaagaattttactctgaagatggtgc

SEQ ID NO: 5896 - DNA, 148 bp, Lilium asiatic
  modified_base (13)..(13): a, c, g, t, unknown, or other
ccggatacccggncgacgacgcgtccggctcgacctaataataattactctcagaatttattataaagggatacaacaactcaagtgggtgcgttatcaagttagggatagggcgacttttaaacgaaatacaatacactgaacttat

SEQ ID NO: 5897 - DNA, 244 bp, Lilium asiatic
  modified_base (57)..(57): a, c, g, t, unknown, or other
  modified_base (62)..(62): a, c, g, t, unknown, or other
gccattctatcaacaaccccttagctttgatcatcgaccaaactactagggctagantgatnttttttatatacactgctcgacccacaataatcctattatcttaaatttatcttttttcacttcactctttttaatctttcttaaatctataaattattaattttttaatatatatcataatttaaaatttattatatttattatctttaatattttacttttccttctcatattttttatc

SEQ ID NO: 5898 - DNA, 53 bp, Lilium asiatic
aacgcgggcaggcgacatcattttttttctatagtttcacctaaattcaattt

SEQ ID NO: 5899 - DNA, 372 bp, Lilium asiatic
aaaagaaatttgttagtttccattacgtgagggtcgatatttagaaatctacaaaactcattatcttaaatttttcacaaattcaaatataaattgtgaaaaaataaaaataatttatataacataatatgagatacgagacaaatttttagcttcctccaatatatgtaatacctaacagtactacatttttccatgtagacactttcttattttgggaaactaaatatataatttttaaaatttaaaattcacaacttttgttataaaaaatttccaaatccctcgcctcttttcaactacaatcttcaatggcgcccaaggctgagaagaaaccggtggcggagaagaagccggtcgaggaggaaaaga

SEQ ID NO: 5900 - DNA, 294 bp, Lilium asiatic
gctaaactacttattctactcagttttatatatatcaacgtatttggtgggggggttttcatgtagaaggggcttgcaatttacataggttgataattgagttacttgacgccggcatcactttatgatgggtgaattaccacctgctgtggatttccaagcactatctccatgtaggctccgtagtgatcttcataattcagtcctatgcactcacatatttacagcaatgggcacatatgtttagatatcctgtattactcatggtctcctgctattactgtaagcttcgtt

SEQ ID NO: 5901 - DNA, 304 bp, Lilium asiatic
taatagaccctagcgacgctctagagtatcaagctcacgtacgcttgcatcggcgcatatctttaatagagcagctacttcaattaactggccacgcttacaacgcccacagaaacaccgcactaaccaacatacacctgtagatctccttgaaaacagcatcgtctaacaagagccaaacagatcgtcctaggaaacacttcgcacctgaatggcaatggaacctcgattgaccagtcataagcactgtcagtaattctgctatttttacaccatatggtgccacctttagtatctagttcaa

SEQ ID NO: 5902 - DNA, 209 bp, Lilium asiatic
gctactaccccttgtatctttgaactatgaatgccaactattggccttctcatttttttggggggtttatccccttgtattctactgtattagcccacttgtaataggtgatctatagttgatcatttgtgttttgttggaatcaactcatgaatgtgacgcttcagtatctttgtaatgaaatggttagtgaattgttacggtttaaa

SEQ ID NO: 5903 - DNA, 416 bp, Lilium asiatic
  modified_base (395)..(395): a, c, g, t, unknown, or other
atccagccgtgctgtaaccagtgtggtttctgcacgaggtcctttcctccactgtgcacgtgcggtgatgagaagcatatctgcccatcctggtgcaagaactgtaagatgtcgccgaagatgatctatccgccgctatacatttgtcaggatctcattgtcaactactgcgatcacaactgtggcttggaaggcggagctgccacatctgagtaactagctgcgcagcaggttggccggtgaccatatggataagtgacggtctatctactaggagtggatagcctctcttccatcatttgcgtagtgctacgaataagtgtcaccctatctatctatctatctatgagatctcccctccatttgcttttgtaataagtggtaggtttataatntcaatgtgatctacttatcta

SEQ ID NO: 5904 - DNA, 169 bp, Lilium asiatic
aagctttcttctattccaaggctgcctttttcctgcgagcgacaaggacttccacttcgttctgtaccttcctgaagaagcttccacttatctccacctttcaatcttccttcatcgtcaaccttcttacctgatggcgactccttcactactgtgagcttactttatt

SEQ ID NO: 5905 - DNA, 174 bp, Lilium asiatic
atgtggttgtgctgtaagtgcaaaagcggtttttgcaaaggcggccgaaacagtagaagtgggggaggataacagaggtggaggcggtactgggcgcccgctctaaaggatccaagctaacttactccagcatgcgagagcatagatatattatagggggacgaaaatacaatc

SEQ ID NO: 5906 - DNA, 281 bp, Lilium asiatic
gacgcgtgcggacgactgataatattgagctgaagctgcaatgccagtcctgtaagcatgtctcacagcagccgggtaagaggtgcaagcattttgagatcggtggacataacaaggggaagggaacatctctcttctaggctgtttttgcaactgtgcacttgtttgcgaacgggctgtgaatgcttctgtttgacattagatctggctaaacagcttatttatgtagaactatgttgaactcctgaaagttaattttgctgctttactcttgcttaaaa

SEQ ID NO: 5907 - DNA, 250 bp, Lilium asiatic
ttcggagcaacttcagatagctctggttggaatccttccacttattgttgcattctaccgcaagaatttccctggtgagtcatatatggcgtacttgaattttgttcctcggtcattagctagatatcatgaggcaataaatctgtggtttgttgaagttgagtcttgtgatttcgtcaattgcatttgtatttcagttttgaactcctgcagttattgaagctattttaggatatcccttgttggaaaa

SEQ ID NO: 5908 - DNA, 323 bp, Lilium asiatic
gtagtgagttcgatcggccgaggtggctttacgagcagaacagcgggactgacaggccggcgaggaggccttatgagcggcacagcgggactgatcgtgcttacgggatgaagcgggagggtgcggggagggggaattggtggacgtctgcagatgatacactggcacaggaaaccgatgtcggtgttaaagttgatgataagactgtaatgccggagaagcatgctgaacagggtgatgttccgacagcggatgtcaaggaggtgcaagcctaggaggttattataccaaataagggctgccgttctagatgatccaagctt

SEQ ID NO: 5909 - DNA, 429 bp, Lilium asiatic
aagctatctatgatatctgccgcaggttccttgatattgagaggcctacttacactaacttgaatcgattgatatcacagaccatatcttctctgaccacttccttgaggttcgacggagctattaatgttgatgtcacagaattccagaccaaccttgtgccttaccctcgaatccatttcatgctctcttcatacgcccctgttatctctgctgagaaagcataccatgagcagctctcagtaccagagataacaaatgcagtgtttgagccctccagcatgatggccaaatgtgaccccaggcatggtaagtatatggcctgctgtttgatgtaccgtggagatgtagtgcccaaagatgtgaacgctgcggtggccacaattaaaaccaaaaagactgtccaatttgttgactggtgccctactg

SEQ ID NO: 5910 - DNA, 278 bp, Lilium asiatic
ctgactaccagctaattgacatttccgaagatggatttgtgagtttgctgactgaaagtggcggcacaaaagatgatctgaggctcccaactgatgaggctctgctcacccagattaaggatgggttcgatgagggaaaagatctggtggttactgttatgtccgcaatgggtgaggagcacatctgcactctcaaggatattggccccaagtaatctcgttgagtgtgtatgtgttaaaagacttaatatgggtgtttgacctaaggtaatgaaacc

SEQ ID NO: 5911 - DNA, 245 bp, Lilium asiatic
aggacgcgtgggcggcgccacaccgtatctctgaatggatccttgattctactgataatcttcatgcatttgaactctctggcccgagataacattgagcagaagaaaatgagtttttgtattttctttgtagggctacgctagtgcgttttgtaagtttcattatgtatgagtttaaattcatgtgtgcatatgaatagattgacttattatattatttcagatttatttattttgggttaaac

SEQ ID NO: 5912 - DNA, 301 bp, Lilium asiatic
ggaaatttcaaattatcctctgagtattcttgctgcagttctggaggaaatgcatggggagaggaatttcttgaatcgtccaccgtcagctgcaagtggttctaattcagatgatagaagcaactgaagtgaaagagagattcttgatgcccgacctgggtgactgtgttcctgggccgcctgaaagtggttgcggttatatactgctgtagggccatttgtctttcccgtttaaaccaatttatcttggtttctttaaattctctcatcttatactctttttatgccaatttggttgctt

SEQ ID NO: 5913 - DNA, 259 bp, Lilium asiatic
tcggggtttctctctctggtagttttatgttttatctcctgtgtactgtcttttggatgttttgtgtgtgtttgtcaaaccttaacaatggtgttcaaggttcttagatcttgtgtagaacttctgttttctatatttctaatggtctagatatttgaagcaatcttttgggtgcttagttttcaatctcaaaaaaaaaaattaaaataaattaaaaattaaaaaatataataattattatataaataaaattaaatat

SEQ ID NO: 5914 - DNA, 313 bp, Lilium asiatic
aactggaaactgctcattaacagggaacccatgaaccagatctagattccatactacacgtccagaagagatccaaagcccagcccaaggaaaaatagaatatatctaacaaacaagacccataattccacactctactagagacacaggtcaacaaacaactcaagcttcctcatcagcagccgtcgactttgacgaaccagccttcttgggcagaagaaggttgtggatgttcggcatcaccccaccattagcaatagtcaccatccccagcaacttttaaagctcctcatcattcctcacatgcaagctt

SEQ ID NO: 5915 - DNA, 326 bp, Lilium asiatic
cccacgcgtccggagacgagtctcttggcatgttattggagtaatgtaaaaagcaacttgatatttcctccaattttagtttcttttgttgattcgttcttattttctctgagtataaatctgtaagaatttttttttcagtgaaggttactctcctgtctcttggtatgttattggagtcgtgtaaaaaggaactagacatttcttcctattttagtttcttttgttgaatcggtcttattttctcgagtataaatctgtaagaattttttttcagcattaattaaatttgtttcagttaatttctgcaaaaaaaaaaaaaatat

SEQ ID NO: 5916 - DNA, 270 bp, Lilium asiatic
tcgtggacgcgtggtcgactggaagcgagatattggcgatatatcggctagggtacagctggccgttgacatttgctaatgtcgttgcgcgcggtttttatatgcacgccgtccgctttcgtgttgcctgttctaataggggtggggcgaactggagagacttctgtcagtgatgttatttacctgaatgttgaacactgcgctttaatgataactcgctttatacgaaaggcatactaagaagggctgccgctctagatgatccaagct

SEQ ID NO: 5917 - DNA, 395 bp, Lilium asiatic
aaatcaaaagcttcacttgaaagaaattggactgaaacactataaatgatcacagtgataaatagtgttcccggtggaactcataacacttttacacagtaacaatacacctaccatgaagatcttatggttacatcaaccacacgaaatagctctcaagacatatgtgcaagcctaactaagaaaagagaaggaaacgcattcaatctcgccaaaaagctagcctctgtctctctgtcacacgtagttccctagtttctctttttaatctggtagattaatgttattggtatcttggctactagttctttttaaatatatggtactgctgtaaccattttgttaggttgttaaaatgttcaatttatgggtccgtttaagcgttttattcaaaa

SEQ ID NO: 5918 - DNA, 295 bp, Lilium asiatic
  modified_base (43)..(43): a, c, g, t, unknown, or other
agcatttcaatttccaatttccaatttccaacctatcgatttncttgctgtactgtttgattagggttgcgaaggacgaggcaagcactttgtgtgtaccctgcatgcccatatttggttattgaactaaaatgggtggtgcatttgggaaggctgactccccggatcttagtgtaccagagtcaaagcttgatgcaaagatggttgaagcgatgaaacgaagggcatctcaggggacatccatgaaatcattcaacagcatcatcttgaaatttccaaaaattgatgaaagctt

SEQ ID NO: 5919 - DNA, 277 bp, Lilium asiatic
gtttcttaagatctgcaagagtctagttggttatgcttgtttttgtttatcgaactttcgggttgttaggtcagtggttttgatcaaactatttgctttgctgctctatttggtcttttgttatgactattcgatttgctacctgttaaaaaaaaaaaaaaatttttaaaataaaaaaataatattattctttaattatttttaatttatttatttaataaattttattaattaaaaaaaaagggccgcccctttttaggatccaagcttaccttcc

SEQ ID NO: 5920 - DNA, 97 bp, Lilium asiatic
aaaaaaaaaaaaaaaaaaaaaaatttaaaatttaaaaaaaaaaaaaaaaaaaaaaagaaaaaagaaaaaaaaaaaaaaaaaaaaaaaataaaaaaaa

SEQ ID NO: 5921 - DNA, 105 bp, Lilium asiatic
tccctgtcgacccacctccgtttttttattttatttttttttatattttcatctttctactcttcattctatggttatttgggtatattttacctaatttaattt

SEQ ID NO: 5922 - DNA, 99 bp, Lilium asiatic
gcggggtgttaatcgagagcggactgtgtagtttatccaattttacatacacatgcatgcgaggggataggggtactatacagcgaccttgaatcaatt

SEQ ID NO: 5923 - DNA, 385 bp, Lilium asiatic
cccacgcgtccgcatgaaacacaagaagcattgagcttaaaagacatctcacataaacattgcattttaagcatttcttttaaaattcatcttatataaacatctcacataaaacatttcatataagaaaatttcatataaatatttcatttcataaaaaaaatttatttcttaaaatttatttcattttcaatttagtaattcacataaaaaatatattttcaaaacaatttaatttctagtcattttttataatttaaaatcattttcatttcatcatttttcttcaatcatatcatagtcttaattagcatctatatttcatagttcatattaagagattaatcatttcttcatcatattttttaatagaacaaaaattatt

SEQ ID NO: 5924 - DNA, 328 bp, Lilium asiatic
aaaaacataccatgtcattaaattttttaataatccagacatttgcaactgcgaaccagacacattcattaaaacaattaaccataaacatcaagctaacaagtcacacttataaaatgtttgttccatccctaaatattagattgaaaactccatcagcctcgcctgtcagcaaactggtcatctttaaaactgtcatccaactggaagtcctgcacgctgttgccataactgtcagcattgctttggttgccatagtccccatcgccactgccactagcatggctgccagcaggagcaccttcagcaccgtcaccatagctgccag

SEQ ID NO: 5925 - DNA, 351 bp, Lilium asiatic
tcgagtcggtcgaaagaattgactcagagagttgttgttgaggacacttctgtcttaaggcgatgtgttcgggtgtctgctcttccgaaggacgagaacaaggtgccatcgttcctccgatatgtgaacaaactgcgaacaaaatgattatcctgattttcttaggatcgtaggagctaaagggcacaagattgtcggagttttatctatctatatatctacaattttgatgtaccaaacagtgattgtgtacatggtctaagttatgtgtcctctttttgtgactctgtcatgctctggtgggatttccctttcaatatattgccaatcagactaacttttagttgggtt

SEQ ID NO: 5926 - DNA, 394 bp, Lilium asiatic
taaacactttcgccatcttgtcatttacctgtattcatatcttccgatctgatcacatgctgcttgaaagacgtggtgctttgattgtacgacgactttgtgttcttctagatgcggaacgtgtttaccgagaattttctacaatcctagagggtgaagatgacttggactttgcttcgattatggttcaggctctgaatttgattttactcactgcggctgaactggctggattacgatctgtcctaaagcaatcactagtaaatcctgctgggaaagacttgttcatatctctgtattcttcttggtgtcattcaccgatggcaacaattagtttgggtctgctatctcaaggataccatcatgccagtgctggaatttaatttcctggggg

SEQ ID NO: 5927 - DNA, 303 bp, Lilium asiatic
tccacgcgtccgtacttgatgactgccagcttagtcctgactccatgcttgactacccgagtggttcgtctggatcgtcggccagcggcggcgctatgccggcggtggtggtgaggaagaagcggagtaatgtcggtggtggtgggtcaaactggcggagtgggtcggagggggtgagccggaggaagggggttccgagccgggcgccgctttcctgaagtggggtggagattgggtactaaggtttgggggcaaatgaaaaaaattgtagttcatgttttttaagcagtgaattgactatta

SEQ ID NO: 5928 - DNA, 264 bp, Lilium asiatic
cggactcgtgggcggactcgtgggctccatccaaatggaacaaagctttccacctctcttatgtatggtgatgattttttgtctttgtagttgttacttgttgacataggatactgcagttggcatttctgtaccatgtagtagttttgttggatccgcccaaggttgacaatcaattccattctaggaggtggtttgaattccttagtgtctcaggtctactaattctaattgcttgaatgaataatgcggcttctgtatcaa

SEQ ID NO: 5929 - DNA, 274 bp, Lilium asiatic
cttcaaaaaaacaaagtttatatcgaataaagtatatacttagactttcgtgtgctagaacgttggctcgtaaacataaaagtacggcacgtgctcttttgcaaagattaggtttgggatttttagaagagttctttacggaagaagaacaagttctttcttttattttccccaaaacaactctttttactttacatggatcacatagagaacgtatttggtcattggatattattcgtatcaatgacctggtgaataattagatgccttctaa

SEQ ID NO: 5930 - DNA, 312 bp, Lilium asiatic
gtcttcgtctcacttttggccatgccaagacctttcactaagatgaagagtcttgatatggatcaagtgatttctgatattgccaagaaacttgcttgaatgaggatgggagtcttgaggccgggatcttgggccttctatttcttctatatatatctatccctgtgttcacttgttctttgagactgtatgatttcagtgtggaatcttagaatgttttcagttgtggtagaggcctttgatacatcataccagactagtagttgcttagtgtgattgttatcagttgtggtagaggcctttcagacaaaa

SEQ ID NO: 5931 - DNA, 80 bp, Lilium asiatic
tccaagcttacttacgcttgcatgctacttcatagctcagggataatgtcacctaaagggaattcacttttccgtcagtc

SEQ ID NO: 5932 - DNA, 414 bp, Lilium asiatic
tcgagcgccccatcttgtcacccaactcagacggtgatcgacatgggtctttaaacatcaagcggctggtacagactggatatggtacctgtgcggggtaccgtccaatttttagacgaagtgtgaacccaggatgtggtaactgagtgtggtgccgtccatttttaagacgaagtgagaacctctttgatgtgagtccaggacccaggttatcagattggtccattccgatgcccctgagtgaatttccggcgctgaagttgactgaacatgacaattgtgatcaatcaatcgcttacagtcatgctggaacgtctgaaccacctcccaaagatggggaggacaatagtgatcgggcaatcgctgacagtcatgccgtatcgtctgaaccgcctgccatagacggggagtgag

SEQ ID NO: 5933 - DNA, 233 bp, Lilium asiatic
cgcgtccggtggtttcttctctttatccctgcatgatagaacaaatgctattacttgacttctattggcttttatttcaaatgttgggtgtgtttgattgagctctttgccatgacaatgtttgtttgccatatattattaatgttttacactgttttattggacatttccccaaaaaaaaaaatatttaaaaagggcggccgttctaaaggatccaagcttacatacacttg

SEQ ID NO: 5934 - DNA, 429 bp, Lilium asiatic
  modified_base (266)..(266): a, c, g, t, unknown, or other
  modified_base (314)..(314): a, c, g, t, unknown, or other
  modified_base (382)..(382): a, c, g, t, unknown, or other
tacgcgttcgctagatcgcgggccggcggtctagatggttcaagcttacgtacgcctgaaggctatccgccggaggggtactcgagggacgcctatccgacgtcggtgtacccaccgcatgggtatcctgctcagcaggggtacgcgcagggatatcctcctcagcaggggtatccgccgcaggggtaccctccgcagtacgcgcagcaggcgcagcagcagcagcagaacagcggtccctcgttcatggagggatgcctggccgncatgtgctgttgctgcttgttggaagcttgcttttgaggtgaagactntgtaaggacattgagactagttggctctgtgatagctatggcagtcgtagttattgtagggcaattgngttagtgtttcttaaggatttgcatttatgggttgtgtggggatact

SEQ ID NO: 5935 - DNA, 113 bp, Lilium asiatic
agccttcggcgtccccgtggggttcagtcgcgagcgggcggtcttgaaggttccaggcttacttccgcttgcttgcgactttatagctcttatatggtgtcactaattcaatt

SEQ ID NO: 5936 - DNA, 276 bp, Lilium asiatic
ggcaaggacgggagctcgccggagatgaagcggaagcgtcgcgtcgcctctataatgtcttaaccatggaggccaagctcaaatcctccgtctgcaacagcttcaagtggttcaggatcaggttcagcgacgtcatctaagggagtaaaagaattctcattatctctatctcgaaataagtaggagggttgtatatattgaatatgatgtatgagtgagactagtgtgttataagtttggatgattaagtgttatgagtactcaaagagtttatta

SEQ ID NO: 5937 - DNA, 90 bp, Lilium asiatic
agatcgccagcggccgttctagaggatcctagcttacgtacgctttcctcctacgtcatagctaatcgatagtggcacctaaattcaatt

SEQ ID NO: 5938 - DNA, 184 bp, Lilium asiatic
taccttcaccaccacctgcgtcgagccgtcgaagctgacccagatgatatcaaccgtctggattacgacgcgcttcaagaactctcccgtcatgagctcgagcgatactgctatcggatgggggtacacttagagcgtgcgactgagcaacatgcggatgttgatcggatcccttataatcgct

SEQ ID NO: 5939 - DNA, 326 bp, Lilium asiatic
tgcatgagttatgaactgcctgacgggcacgtgcttacgatcggggctgagagatttagatgcccactagtcctcttccagccgtccttgatcggcatcgaagctgctgggattcatgagacgacgtaaactccatcatgaaatgcgatgttgacatcatgaaagatttgtacggcaacattgtgctgcgtggggggtctaccatgttccctggcatcgccgatcgtatgagcaaggaaataactgcgcttgcccccatcagcatgaagattaaggtggtggcgcctcctgaacgtaaatatactgtttggattggagggtccatc

SEQ ID NO: 5940 - DNA, 258 bp, Lilium asiatic
tatgttgtttatagtccttaaatggaaagactcccaccacttgtttgaccatcgagcgggggcgaggctcttatcagacaccacacaagtgtggtcttcttcaacgacattttttatggaatatccggggttcatctattcagctggtgataaaccaacacacacactgcatcgattgcattaattgtcaagagagcctatcatgtgatactgtctctgttcgaacataatgagagcgaagactcaagagaatccctc

SEQ ID NO: 5941 - DNA, 415 bp, Lilium asiatic
tccggaagtaccagaagagcaccgagctgctcatccgcaagctccccttccagcgtctggttcgggagatcgcccaggacttcaagaccgacctccgcttccagagctccgctgtctctgccctccaggaggcctctgaggcgtatctggttggtctctttgaggacactaacctctgcgccatccacgccaagcgtgttaccatcatgccgaaggatatccagcttgcccgccggatccgtggggagagggcctgagctgtttgaacaaatgccccaaagagagtagacttgttttggtttttgtctttttgtggaaatgtcccagagagagaaaaagtgttttggtttttagttcttggggttagatatcttatcttgactcagatcgattaattgtgtcgatgatttccatc

SEQ ID NO: 5942 - DNA, 344 bp, Lilium asiatic
  modified_base (72)..(72): a, c, g, t, unknown, or other
  modified_base (84)..(84): a, c, g, t, unknown, or other
  modified_base (117)..(117): a, c, g, t, unknown, or other
  modified_base (136)..(136): a, c, g, t, unknown, or other
  modified_base (298)..(298): a, c, g, t, unknown, or other
gacggtgaagaagtctagggtcaatgcgattcttaaggtcgtgaactacaaccacattatgcggactgggtncacgctggatgnggatctcagagatgttgtgaccgtttatgcccngcagtttaaggacaataangtgacttgcttgcaatgagacgatagcgaggctcgaggatcgcttcaagaccgggaagaacatggtgttttttactaagctaatggtctagatagatttgtaaggttatgggttttgaactgctagtctatgttggtacctcgttttaagttgatttggtantatttgaatttgtggttgtaattttcagtttttgaacctttctatg

SEQ ID NO: 5943 - DNA, 236 bp, Lilium asiatic
tggacgcgtgggttcgaaggagataaatatgggagaacagtgattcccgtgacctgggttgagggtggagatgagatattgttgacattacagggcggagctcgttacacatgaatagaaatacaagcgttcattcttgagaaatgatctcttgaacaatcctttagattgtgtgtctaatgaaacatgttcgaacggatgacaacgtgaatgatacacagaatataaagaattgt

SEQ ID NO: 5944 - DNA, 215 bp, Lilium asiatic
gggcgacccacgcgttcgtccactcgaccgtagtctctctactttcttagaggtcttcttttcgccagtagcggggtatgtagacaattgagttggtttaacatttcttggttccgctaatgcatacattttcaagtattgtgttttgaactgctctgatggctctacttttatagtcttgttttctttaggcaataagaatgagggattgaaaa

SEQ ID NO: 5945 - DNA, 197 bp, Lilium asiatic
tacaaactgataccacgccggacattcttgttaatcttcacccaaattgtattccgggtgggtacaataataacgactctacattcatcaaagaaaaagacactgctgaagggcttgaagacgaagctcccgcttatgtgcaagctcataatactaaacatgtttataagaagctccagaagagacacaatcatctt

SEQ ID NO: 5946 - DNA, 111 bp, Lilium asiatic
  modified_base (39)..(39): a, c, g, t, unknown, or other
cacgcccacgcgtctatatagacagcggccgctccagangatccatttcttcttccgcctgcatgcgaggggcgtggttcttctatagatggcacgctacattcaaatcat

SEQ ID NO: 5947 - DNA, 123 bp, Lilium asiatic
gggcgacccacgctttctctcactctttcgtctatatcgcgagctgcctttctagagtatccaaacttacttaggcgtgcgttcaacaacatatctcttctatattattacctaaatacaaat

SEQ ID NO: 5948 - DNA, 377 bp, Lilium asiatic
aagaagtttcctttggtttccaaaaaaaacttcttgacacttcattttcaaatctgatggagaattggtcatgtataactatgggggagttacgacaggaccaggatataatagcctaggaaaacataaaatggttacatctcgttattgtctctaccacaatggtgctaaagcactaccatacttacagcaccagtatgatacaaggcaattattccttttcaaggacagacgatttaagaacgcatccgaaacatgtccgaggatcagaactggaactgcatctcctttgtgtattccagagcttcaaggtgggtagctatcgccttgttcatcggaggtggaccacatctcataatctgaatgtcagatgctgg

SEQ ID NO: 5949 - DNA, 247 bp, Lilium asiatic
cggacgcgtgggctgcactcaatcatggattcattcccttgactcatatttgatcgactatatctaactaagagagcatatgttgtaatatataaggtatgtcagaatttatgtatgtgtggggttcatttcagaatttaatatgtaagttgtgagaacttatgtgtgtattcatttcacatggactcgagattatttgtatcagttgaatgatattgtcgagaacaataatatatagtgtttgttt

SEQ ID NO: 5950 - DNA, 219 bp, Lilium asiatic
aaaaaaaaaaaaaaaaaaaaaaaaaaaaaaatttataaaaaaaaaaaaaaaaaaaaaaaaaaaggggggggtattaaaaaaatggggcggcccctctataggatccaaacttacttactcgttcatcctactaaattcttcttttttagtaaaccctaattttattcaactggccctccttttaaaacatcttcatttgtaaaaccctttccttaccca

SEQ ID NO: 5951 - DNA, 376 bp, Lilium asiatic
atcgtaagcggccagtctacaggatccaagcttacagacgcctgcctgctacgtgctaggtcttatatagtgtctcctaaaaccaatatactggccactggtctacaacgtacagactgggaaatccctgaaccttcccaactcaatagtctagcagcacataccacattcgcctgttggcagattacctaataggcccgaacccatcgcccttcgcaacagttgaccagtctgcatggcgaatgggacacgccatgcaccgtgtcattaagcactaagcgcgtggtgggtactcgcaacgcgaccggtgcacttgacagtggcctagcgcctagtgcttgcgctttcttctctttctttttcgtcacgtgcgacg

SEQ ID NO: 5952 - DNA, 167 bp, Lilium asiatic
tataatttcaattcagagtttttaattactttgacccgatagatcgtagtgataaaatgtccgcatttaataagtaataatgcatcgtttcattgtatcattaaccattttatttttttgttctcttttctttctattaatccacatattttttttctctttttcct

SEQ ID NO: 5953 - DNA, 382 bp, Lilium asiatic
gcgatggcaaccggctcattatattcacatccaactgaaagtaaattaaatgtctgaagtagcagtaatatatacacaacttattcgtattcaatagatagagacctctggttttttgttgcgatccaaataagaggaattggacacatcagttcgacacacaagtagacccagtcgaaattttgattaacacacaagtagctggtaaatatattcagttcgacaaacaagatccagtatgcagtggaggggtcagccagattcactgggagggttctcctttgggtgtttggcagcataatgatccgggagctggttctggtttgctagttgtaccttgcagatggggcacgtgactttgagcgcgacggcgcgggcctcg

SEQ ID NO: 5954 - DNA, 512 bp, Lilium asiatic
  modified_base (455)..(455): a, c, g, t, unknown, or other
atttattttaaaaaaaaaaaaaaaaaaaaaataaaataaaaaaaaaaaaaaaaaaaaaaaaagaggatatttaaaaatataaaatgaaaaaaaaatttaaaatttatatgaaatatttatttaacgtttatgttttttttttttttttttattttttttttttttttttttttgggtttttttttttatatttttttttataattttttttttttgttttttttattatatttcttttatttttatcttcttttttctgtttttccttttttttctttcttttttttatttatttcttttattttatttctctaccctttttttcctttctttttttttttttttttaatttgtaattctctcccttttttttttttttcattttttttttattttttcatttttatttttttttgattattctattttttattggtttttcttattatattttnttttttctttttccttttttttttctcttctattttttttctttatttttttctttt

SEQ ID NO: 5955 - DNA, 232 bp, Lilium asiatic
gccagtactacttagccgctgctcttatacgaggcggcgagaataaaaggcgcttgcaatgggtgcacgagtctgtattgctgtagtattctgtttcagctaaggatgttacattttaaactcccattaatttgtatgatggagtatgttgcatcgtaattatattatgatacaaaatttgagttcttgcttgttatgaactggagtttcaaactcgtattttggtccgaaa

SEQ ID NO: 5956 - DNA, 465 bp, Lilium asiatic
tgcgggagtgcaagaggctgattaaggattttgagaggggggcgaaggaggaggagagccggagtgcgccggatgccaataggatgattcatgagaggaagcaatcgatgatcaaggagttgaattcatttgttgccctcaagaagacactataaatgttggaacagagacgacggctgctctcaaggcacagacggaacaaatgagtaggattgttaatgaactagattctatccacttctcaataaagaaagcaacccagttggtgaaagaaattggtaggcaggtggcaactgaccgcgctatcatgggcatgctttttctgattgttctcggagttatagcagtcattattgtgaagattgtgcatccaggcaacaagaatatcccggatattcctggtctcgccccaccggcaagtcggaaactcctttgaattatttattacagatgaacttatacagc

SEQ ID NO: 5957 - DNA, 153 bp, Lilium asiatic
gatttgtgctatacagataatggagataatcaaaaaatggctggtgtgtgtatttctattggttgtcattcttttgtgttgcacttctttagccagaacgaagttctgttgtaggcgaagatctttatatcaaacatgttgcttgggaccaca

SEQ ID NO: 5958 - DNA, 400 bp, Lilium asiatic
  modified_base (379)..(379): a, c, g, t, unknown, or other
taagaattgttcttcctcctatcaaaacaattttattgcagaacattttgttgctccagcgcgcaatcattgtaaaagggttctgatatatgcagcctgcatgtaagttggtgtgaagcatttggtggcatttagtttgcagtactgaagaatttgatgggtatatgcagtagaaaagtgatccccatttcttgaagaattggctcgaaggaccttatggttcccagagattttatgtggtcagtttctttcttaacctggtataattttttccggtgcactgaaagccgatttatgttgtgagaatgcctttgtccaagatatcagcctctctaattaatgggtatgtttataataacatgtgacagttctttgtttnaaaaaaaaatttataatattt

SEQ ID NO: 5959 - DNA, 163 bp, Lilium asiatic
gtgaaataagggccttacgtccccgtgtctgctaggtgtattagtacgaggagtgtcatggaataagggctttttaagtccgagtgtttgctatgtatatcagtgcgtggagtgtcttgaaataagagctttatgtttatttgtgttttgctatgtgaatcag

SEQ ID NO: 5960 - DNA, 179 bp, Lilium asiatic
catgaataggtccggtgatcaaatttgatcgtgagaaaccattcaggagttcttctggtcggaagaattcagttacatgtaaactgcaacctgttattttcttcaacacgatttcagtattatagttgtcaatttgacaaatttgatccatgactgtaaatgagaaaggtgttggaatt

SEQ ID NO: 5961 - DNA, 123 bp, Lilium asiatic
aaaaaaaaaaataaaaaaaaaaaaataattataatggtctgccgttctataggatccagcgggcttactcttccattctactcctatatctttttatattttcacctaaatttaaattaattt

SEQ ID NO: 5962 - DNA, 335 bp, Lilium asiatic
cttgggaaaaacgatggcatggtgaaaggcaagcgttatttcgattgccctcctcagcatgggctattagttaggccagataaagtcaaggttggagactacccagaaagggatccatttgaagaagatgagatataatccaacggattgtagaatctatgttcttacatatcagtgtacacttcatatgttcttcttctggccttcatttttaatttatgagtctaccatgtagatttgaatattcttgataaaagttgtgttattctttatatgtcaatgttgtatgtcgatttgaaattcaatagtaaaacttgaaacaaaggatgtgaaac

SEQ ID NO: 5963 - DNA, 209 bp, Lilium asiatic
tcgccactctatcatttacacattaattttattatattaaaaactcactcacatacctccggtgtttcatcttatccttttactaaatctcctctaaaatactacttatcaatctacaaacccatcccttcaacttctaaatactatattttatctcttcacttacaaatcttttcccttatctttccttacctatcctacaaacacac

SEQ ID NO: 5964 - DNA, 281 bp, Lilium asiatic
taaattcttgtaaatatgtaaatatcattagtacataatcatagccataatcagggagaagggaaaacacctataatctttttaaacagtgtatagttagcttatcactgttatactttaaactgtaatgtgtgaaaactgtaatgtgtgagaattaatcctatgtattcatgccatgttctttttcaaaatataattttattaatatattttattaattattatatggggcgtctcgtttataggattcatgtttacttatgctttgcatgctactttat

SEQ ID NO: 5965 - DNA, 235 bp, Lilium asiatic
catttaccttcgtactcgaacttgtacatgatgtttccagcagctctctgcatctggggggggtgtccctgtgtgtaaataagtgtattctgggttccttgtcattacatttacaaacatggacacattggggattaatccattcagggcattggtatctagatccataccatgcagacatgaatatttcttatgtatgctaaaattatcatcatgcatgtcatatgttaagcct

SEQ ID NO: 5966 - DNA, 268 bp, Lilium asiatic
ctctttctaaatgaaatcaagtatacaatttcatcaatgccgcgccgccgccacattccgatacatttataacaaattttcgacaattctcatcccatcttactcccctagcctgatcctaatcataactttatcattctccgattccgctgttcaactaaccctgggatgctgcttatagactgccttaatcttctgcaaaccatcatcattttacaatgatttatgcttaccttacccttctaccttaacttttcctcctcccttt

SEQ ID NO: 5967 - DNA, 195 bp, Lilium asiatic
gcgccagggacgcaccctctatggcttcggagggtaatctatctacggtttcggtggatggacgagaaatcaattctgtctcctcttatcttaagagtgttaagtttgtgatgtgaatcttcgctttttatttctttctaaatatggagctgtattacatctttgtgagattatgaactgttttgattgctctaa

SEQ ID NO: 5968 - DNA, 318 bp, Lilium asiatic
gtccggagcgagataaggaggcggaggaagagaggaagggtgcggctaatgctcttcgtggagccgcctttatgtatgtctgatgtggaacttctcttattgtaaacaatgcattgttgtaatatttggtaatgatagactcaaaatatttctcgatcaatgaattaagttaaatgtcttaaaaaaaaaaaaaaaaaaatataataaaaataaataaaaataaaataatataaataataaaaaataataattattggggcggccgttttaaaggatccaagcttacttacgcttgcattcaactttatagcttttttt

SEQ ID NO: 5969 - DNA, 321 bp, Lilium asiatic
aataaatagattgtacataaaatattattacatacaaaaatttcttctttcttggcgacatatttttggtgttggtcgagacaagcaacattcaagtatatgggtgtgaagagtacctctctttaaccattttttcatgttattataaataaattaatataaataatatatctaacatatacaattaaagttttatttatcttttaatgaatttcttctaactaacatattttatgtacatataatactttgatatatatatatatatattaaattatatattttaaaaaaaaaaaaaataaaattaaaataaaaataaat

SEQ ID NO: 5970 - DNA, 171 bp, Lilium asiatic
  modified_base (76)..(76): a, c, g, t, unknown, or other
tgacggctatggatgttgtgtatgctctcaagcgccagggccgcacgctctatggctttgggggttgatgatgtantgttctgttctaaatctatgtttgttctggggaatttgggttgggaatgtctgttcttcatatttctcgtagaaatgaaatttgcttcctgttta

SEQ ID NO: 5971 - DNA, 239 bp, Lilium asiatic
gcgaggcgtgcgaaaacagactgaatctggcacaggagatgctgacttccagcaaaagtaccatggctctgggaagactactgatccacgggggtagtctggattcacatattgaagggaaattgctaagagaggaactgggacgcagcatctcactagggaggggattggagtctgaactatacaatgccgttcagacgcttgtgcccagaagattatctctgtcactgagaggcccg

SEQ ID NO: 5972 - DNA, 172 bp, Lilium asiatic
  modified_base (1)..(1): a, c, g, t, unknown, or other
  modified_base (19)..(19): a, c, g, t, unknown, or other
nacatacttatacttagantaagctccctttttttcaaataaatatcctcaagaggaaactgaatctaagtataagcatgtagtcacgcaatcacatacatccctacacttaaattaaacaatgtcctcaatgttcggaggacatgccacccaaagatgggtgacttattaa

SEQ ID NO: 5973 - DNA, 384 bp, Lilium asiatic
aacagatccctcgaggaaactaacatcgttctctggtatgtatttggggttagccacattcgtgggctcgaagattggcctgttatgcctgtggaacacataggttttatgcttatgccccatggtttcttcaattgttcaccagctgtggatgttccacccagcactactgagagcgagcccaaggacaatggagtttcaaagccgcttcccagtggtttacttgcaaagctttgagggatatcaaatgatgtaacaaatatgagcaggcacttaaaattgattccaagtaaaaagactctttcttgtggcttgtatggtaatgtagtctggactgtgctgtaaatgactcgaataagatgctcatatgatgacgtttaaaaa

SEQ ID NO: 5974 - DNA, 297 bp, Lilium asiatic
  modified_base (61)..(61): a, c, g, t, unknown, or other
gcgcgggataaatcttgttatttagtaacactcatttgctcttgttactttcggatttttnggaggattgatgggcttgcttacaacttgtcttgatatttgcttagtccattccaagaatgatttgtgaggaattatttgcttgattctaaatattcccttctctatttctataatgaaatgcttgctggaattaattgtggattgcataaagaattggaagttttacaaacttgaaacttagaaacttggatcgtgatgatacttggaaactttggaagttatcccttactaaat

SEQ ID NO: 5975 - DNA, 385 bp, Lilium asiatic
  modified_base (320)..(320): a, c, g, t, unknown, or other
acgcttggctacgagcttcccaggcactcaactttgatgactgaaggtttacagcggaaggagaagcctgcttatgataaggtaatgaccagagtcttgtgttatctagcctgagtctctgcttattgctattgtgaacatagtactattcctgtgaggatcctagacgagaagtggattgcaggaagtcattatgtccttaccagctaatgttttgctagaattaaacttcagtcctgttttgcctgtctgtcgttctgcagtataattactgttcagagttgttaaaagatgctgtgatccgcagctcattttgttgntgcttatcaaaaaaaaaaaattataatttccttttggggcgtgcgttctagaggatccaagctta

SEQ ID NO: 5976 - DNA, 197 bp, Lilium asiatic
cggacgcgtgggctgataatgtacactgacatcttcaggtgtagaagtagcgcgtagcttagtcgcgtggattgtgtgttggtgtgtacatagagtgtctgatctcacttcgtactctaaatatttctttagttggtaatgagaaaccaactacacattcatcctctaatctctcctcttttatcaaggtatcgagc

SEQ ID NO: 5977 - DNA, 341 bp, Lilium asiatic
  modified_base (6)..(6): a, c, g, t, unknown, or other
  modified_base (9)..(9): a, c, g, t, unknown, or other
  modified_base (12)..(12): a, c, g, t, unknown, or other
tttttnganganggcaaggaaaagaccaagggacttcttggtgacttaaggtgacagatttgtttcgtaccaaaaaaaatctccaaatttatcaaaacggaccttcactgacttggcgatcattaccaagtttaaaattctatccacatattcggtgaacttgggtaaaactactacaacatgatcaattgtcttcagcagcagtttcttaacattttattcatattcgatggattcgggtaaaggtccaacaacatgatcaattgtttttaagaagaaaatttcttctccggctttttttctttttggggggcgtttttggttttttacaaggcattttt

SEQ ID NO: 5978 - DNA, 271 bp, Lilium asiatic
aagcattcaacttttcaagcaggctaacatcgcggtggtgtctcgagtcgtgttgcataaattccagataatatgtagtccattgcttgtttgtttgtcgatgatcgaacttgccattttcgccggtttctgtttacaaaggatgagtcatgtaggccttgcactctatactctgttcttttgttttgagaatgtagtttttttccaggccaaatcatatatcttgtacaaatagaattatggcaatgcattaaacatacaggttcgtatt

SEQ ID NO: 5979 - DNA, 78 bp, Lilium asiatic
tacgctctagtacatccaagcttacttacgcgctcatgcaagatcatatctcttttatagtgtcacctatattcaatt

SEQ ID NO: 5980 - DNA, 272 bp, Lilium asiatic
aagcattcaacctttcaagcaggctaacatttttgtgggggctcgagtcgtgttgcataaggggcagataatatggaggccattgcttgcctgtttggcgatgatcgaacttgccatcttcggcggcttctgtttacaaaggaagagtcatgtaggccctgcactctatactctgggctttcggcttgagaaaggacgctttttccaggccacaatatatatcttgtaccaatagaattatgggaatgcattaaacatacacggttcgattt

SEQ ID NO: 5981 - DNA, 246 bp, Lilium asiatic
ataggggggacagctccaatatacccacatctagtattacacaaaaggtaatatttgaatagctgcgcataatagttcatcaaagattcatgtcctgaaaacattactaaactatgtttctggtacatctgaaaaattgacctacagcttgttatgaaccaaaccatgtaaagcccagcttagtcttgactctaaaatcatcgaggggttctgtatgcctttacacatgtaagaagttccctcgcc

SEQ ID NO: 5982 - DNA, 107 bp, Lilium asiatic
  modified_base (92)..(92): a, c, g, t, unknown, or other
gtttattacaagcgtccgaactagaggttccaagcttacgtacaccagcatgcgacgagataggtcttttatagtgacagcgaaattcaacncaatggacgatacca

SEQ ID NO: 5983 - DNA, 326 bp, Lilium asiatic
ctcaaatctctcatcaatcatgtcaggccgtgtcaagggagggaaggggctcggcaagggcggggccaagcgccatcgcaaggtgctgcgggacaacatccagggcatcaccaagccggcaatccgccgcctggctcgccggggcggagtgaagaggatcagcggcctcatctacgaggagacccgaggcgtgctgaacatctttctggagaacgtcatccgcgatgccgtgacctacaccgagcacgcgcggcgcaagacggtgacggcgatggatgttgcgtatgctctcaaacgccagggccgcaccctctatggccttgggg

SEQ ID NO: 5984 - DNA, 304 bp, Lilium asiatic
tgtacaaccaccccgtcgaggggctcctcctttacactgtaggcggagctttatcgttcctagtctcgggcgtgtctccaagaacttcaattttcttcttctcctttgcgaccatcaagaccgttgacgaccattgcggcctctggctcccaggtaaccccttccacttgctcttccgcaacaacactgcataccatgacatccaccatcaactatacggtagcaagtacaccttctcgcagccgttctttagcatgtggcatcgcatccttgtgactcacatgccatacacaatcgagagaag

SEQ ID NO: 5985 - DNA, 390 bp, Lilium asiatic
taccccacgcgtccggtggagggatgccatggatggcgatcatcttcagccttctggccgccattccggcgggggcgctgaacatcggcgtccaacacaccaactccggcgtctacgcgaataaggcgcaggagtgtagcaggaagtgtgaatctgagtactgtaatgttccaccgttccttcgatacggtaaatactgcggcatcctctacagcggctgccccggcgagaagccctgcgacggcctcgacgcctgctgcgagaaccacgacgcctgcattcaggctcaccacaatgagtatttgagccaggagtgcaacagcaaatttctggactgtatggaggccgtgagggagtccgggtcgccaaccttcaagggcaacaagtgca

SEQ ID NO: 5986 - DNA, 216 bp, Lilium asiatic
gcgcggcgtgctggcaagggcgtcgggggattatgcgcacgtgatcagtcataatccggacaacggcacctccagaatcaagcttccatcaggagctaagaagattgtaccgagcggctgcagggcaatgatcggacaggggggtggcgggggtaggactgaaaagcccctactcaaggctggtaatgcttaccacaaataccgtgtaaagaggaa

SEQ ID NO: 5987 - DNA, 298 bp, Lilium asiatic
ttttgcaacacaggatcaaatcctttaccaaagaaagtatctgcgtttcccgctatacagaagatgagttcaaaatacacattaatatcatcaattccccagtaaacagaaacggtgaatcacaaagacacgacaaaaaaaaccaactcctaaacagagaactcacagatcttgtaatagtacacagcttttgctactataaactacagcttgttagacagggatgtattacagcagcagttttacatctatggttattagcacttgatatcatggtacaccgacaagacaatttata

SEQ ID NO: 5988 - DNA, 320 bp, Lilium asiatic
  modified_base (259)..(259): a, c, g, t, unknown, or other
tagggacctggtctctcccaatactacggtctttgcctgcaccgtggggcagaagccgagcaaagctaaatattatctggatgacacaactgatgttgtaaatatgctgcaagccctcgcagaagtctccgcaaatggaacaacttcgatactagagtcagaagatgatacatcatcctgagatgcatccttgattggcttctttctttaaataccgcaggtgaaaaaaacttagtctggcctgaagtagagcatcagnttaattagcacttggatataagtgcatatactgattgggagagcattccttacaagcttga

SEQ ID NO: 5989 - DNA, 183 bp, Lilium asiatic
tattactataaaatatccaaatgttgcagagagttaaatttctgggactattaaatgtgttgtgttgtgttgtgtcgtgtcgtaaggcaagtttggtcttgtgctctgaattggattgatggatttaagttcttgtgtatctgatggtggttattattactatagtacaatacttgttctagt

SEQ ID NO: 5990 - DNA, 182 bp, Lilium asiatic
agaaagtatttgtaatagactctcttcacattaataaatattaagttcttgttttaaaaaagagaaaataattaaaaaaataaataattaaaaaaaaataaagggctggcgctttagaggaagcaagctcacgctcgcgtgcatgtgaagtcaaatgttttttatagggacacctatattta

SEQ ID NO: 5991 - DNA, 202 bp, Lilium asiatic
ccacgcgtccgctcaaaaatggtttcccaatctaacaatggacaacatatactgcaccttcttcaaaagtttatcgtccatacgttctgctaccacattccgttatggtgtctctcatattgtaaatgaagctcaatatctacatcttgacatacactacgtcattatatgatctcaacatatgaacctttctgctggtttg

SEQ ID NO: 5992 - DNA, 141 bp, Lilium asiatic
tagggctttgagttgcgccgccgccaccgccccccgcaacgatggtggagaagggtagcaaggggaggaaggaggaggtggtcaccagggtgaacaccgttaacctgcacatacgccttcatggatgcacctttatgaaga

SEQ ID NO: 5993 - DNA, 282 bp, Lilium asiatic
tacagggttggcggacgagcatcgaatccgtagcttcttcaacctctgcagcgatggccgagcctgaactaaaagcccttagcaaagaaaaatgcaggagttgatggcacaacaaggagctgggaatcaacataatgcaaggcagcaaaaagcacaagaagaagccaaaaaggaagcaaaaaaaaacaaacagcttattcttaatcaaattcttttttgacaaaccaaaaaaaaacttgcttgaattgctttggtgaaaccaaaaaaagccaaaagaatgga

SEQ ID NO: 5994 - DNA, 258 bp, Lilium asiatic
gccggcgtgatggaggtggtggcggtggctacagcagccgtagcggcggtggttcgtctgacggcaactggaggagctgatcatgttgctggtatctttttcttaggtcttgagctgttggtttgaacttgtcttgctttgttaaattagttgtggtctgctgctgagtatagtctcgttacgtctcgaacgagaacttggaagaatatggtgtggtttttgacctggtgaactgaaacaaatctaggttgcgtgaaa

SEQ ID NO: 5995 - DNA, 343 bp, Lilium asiatic
acgcaagttttcttgatgattagtatatgtgtatattcatacagaattggctaccaagaaggggggtgagggtcatctagcatcacatgaataatacatgttttagagggttggaacacacatgagtgtggagatttgatgttggatgttgagaaaatatggtcttcagcactcaatcattgattcattcccttgactcatatttgaacgactttttctaactaagagagcatatgttgtaatatataaggtatgtcagaatttatgtttgtgtggggttcatttcacaatttaatatgtaagttgtgagaacttatgtgtgatttcattttacatttgactc

SEQ ID NO: 5996 - DNA, 322 bp, Lilium asiatic
cgagggacgactcacgcgacccgtgacgcgtgggctagttctagattttggtcttgcgctctagaggattcaagcttacgaacgcgtgcatgcacagcatatctcttttatagagcgtgctgaatttataaaagtggacgatgctttacaaccatcgtgatctgaacactgagaatggtcgcgcacaaacatttttatctgaaaccaaagaagttgagattaaggattttcctgctgttgagagtgccaaagaatgagagcatcatgtctgagagcatgacatgaagaaaggtctgagtttgctaaatcaccctcagtaact

SEQ ID NO: 5997 - DNA, 170 bp, Lilium asiatic
tagacacataaataattaaaaaacatatagtatttaaaataatatgacatacattatgcatgataataaaggccatatattaaaaaaatatttttatataattcctataaggttagatccatagtcttgtacacaatccttgttttaaattattatatttttaaaataag

SEQ ID NO: 5998 - DNA, 316 bp, Lilium asiatic
ccccggcagcgctagtggcggccccggctatatcaggatatcatttggagggctgaaagatgaagagtgtgaagatgctgctgagaggctgaagaaggggttggaagaactagtgagggatgggatggtgcaatgaagaaattgctatatctgctaagaaatttgccaattgagattcttgacttttgtttgaataaatggatattggggcgagaaatttgtgatttctcattggatggtcagatattggcaaaaaaatatatttgatcatgtaaaacttatctaatatattctgctattttttctcttgataaaa

SEQ ID NO: 5999 - DNA, 264 bp, Lilium asiatic
  modified_base (8)..(8): a, c, g, t, unknown, or other
  modified_base (42)..(42): a, c, g, t, unknown, or other
  modified_base (47)..(47): a, c, g, t, unknown, or other
attcatgnaaatgttgttcgcatgtggttgatcgtttgctgncccanaaaaaaaaaaaaagggaagggaaaaaaaaaaaaaaaaaaaaaaaaaaaaaagaaaaacaggtcagacgaataaaaaaaaacaaagcgggccgtccctcgaaaacaacctcccttacggtcgcctacatgcaccaaactagcctttctttccccccacctaaaaccaattgatctggcggcgctttacaaccttattagcctggaaaaacttgcgacc

SEQ ID NO: 6000 - DNA, 80 bp, Lilium asiatic
  modified_base (54)..(55): a, c, g, t, unknown, or other
ctgatagttggtggtaacctgtgaaaccattttagttttttggtattggccccnnaaaaaaggaagggaaaaaaaaaaga

SEQ ID NO: 6001 - DNA, 251 bp, Lilium asiatic
catttcaagcgaggccaacttcgcggcgtgacactgacgatgaagggcgagggaagaaggagaggggggagcatgggcacagccatgaccgccccaaacggaggtgaagattgtgaggagagatgctgctgagagttgcgtgataaaatgttgggcaggtttctttgatgcctgcattttcatatagtgtcaaggtatatacatttgttgttactttatattttcaagattgataatatgttgaggcctaa

SEQ ID NO: 6002 - DNA, 224 bp, Lilium asiatic
cccacgcgtcctgggccgcaccctttacggtttcggcggctgatctatccatctatctagggtttctcttgttgggattatggatcggaacttgggattttgttactcttggctttcaatctttaatgggatgtaaatcgtgttctgttctttagggattcaatccttcaagtgttatttctgtttacatttccctattttaaagacgactcccaattggttaa

SEQ ID NO: 6003 - DNA, 246 bp, Lilium asiatic
ctttgttcttcatattcttcatcgttctcggttaccaaagggctcactctcgaggaaatcgaggccaaaatcgtgtaggtttatgttgaactacgtttttactatttgtattacctgctcggtaattacatgatgtaaatttagggttaagtagattaaagatgataaacatggattgtgttgtaatatccattttaagtagcagttctgtaatgtttagcttcatgaaagatgatgcttcagaca

SEQ ID NO: 6004 - DNA, 374 bp, Lilium asiatic
  modified_base (67)..(67): a, c, g, t, unknown, or other
  modified_base (69)..(69): a, c, g, t, unknown, or other
aaaacccgggccgacccacgcgttcgcccacgcgtcctttgcctataagttttacttctctcgccgncncagcaacctacggacgggcctattatacatcaaggaccggccaatatgcttaagattcaatgacacaaacataaaacaatattaagaagtctcaacagcatcaggtaatatgactgggggtggaagccttgggccaaatatactggaggtttgtcactagatgtcttggtttgcaagtcccttttcttgacttggttggagtaatacttgtattgagaaagggactggcggaaatacatgcctgaatctgggaaagctctgggggtggtgatttttaccatctaaacctaattaacattctacct

SEQ ID NO: 6005 - DNA, 225 bp, Lilium asiatic
ctgtggttgtgtcctgtttctgttttgggtttttggctgcgttggatatgatgaattgtggtcgtttaatttgtatggagacttggtttaatggtgctagttggttaaaattgtgaattctggagtattggtgggtttagatttggtactggtagttgatgtaatctgtggaaaaccatctgggttttgttgaatcaagtttatggagtgatggttgtgtctaaa

SEQ ID NO: 6006 - DNA, 321 bp, Lilium asiatic
  modified_base (8)..(8): a, c, g, t, unknown, or other
ctcctcangggcccaaagtatgctatggattttgtgtagcactttggtccagcacctggtgtgccacatagtcacactaagccatatgtccgggccaagggaagaaagtttgagaaggctagagggaggaggaagagccgaggttttaaagtgtaatcaagtttatcttatttatgaagaaagcaggtttgaagcctctgttgtagtagcagagttgatcttctatctgaatttgtgtttcatttttttcttcagttatttgcagtattgtaggggattttgttttttccctcaagaaagacaatttacatgcttgcaaaa

SEQ ID NO: 6007 - DNA, 342 bp, Lilium asiatic
ggaaatctctcgaaggcataaaaattctcgttttatcaatcatgtatcacttcaaaaaatgaaactagaaagcaaatcttccaaaccttgaggatctatactttacttgggtacccatctctattgtaccccggtctctgtatgtaagtgcgtgtaggtgtacgcatggaatcattatagacatattttcatcacgctctctaattccagacagcaatctttttctattgtctccatagagttcagagaaaagtaaccttaaagctcaatagagttcagagcaaaataaacttaaaatatgctaatctctcggtaaacacgtaaaatccttatatgcattaa

SEQ ID NO: 6008 - DNA, 338 bp, Lilium asiatic
  modified_base (308)..(308): a, c, g, t, unknown, or other
cccacgcgtccgaagcaatcccttgcggtcttctctccctcccccaccccggccccgggacgccaacgcgagtcaagggagagatggcgaagagttgtttcaagcaggagcatgattttgagaagaggcgtgctgagtcgggaaggatcagggagaagtaccccgacaggattccggtgatcgtggagaaggctgagagaagcgacataccaaatatcgacaagaaaaagtacttggtgcctgcggacttgacagttggtcaattcgtctacgttattcgcaagcgaatcaagttaagcgcagagaanggcatcttcatatttgtagacaatgtgctt

SEQ ID NO: 6009 - DNA, 215 bp, Lilium asiatic
ttctactgttataaaacttaactatttatactttcactattcaagggcttaaaagggcaatgccggcatccaatatgttttaaatggatggtcaaaaagatctatttggatattaaaaagaaaaaagactctccaaatgagccctaaaagtagatatttattcaaacggctgtcgttttagaggatccaaatttacaaacgcgtgcttaccacgc

SEQ ID NO: 6010 - DNA, 183 bp, Lilium asiatic
aaaaaaaaaaaaaaaaaaaaaaaaaattaaaaaaaaaaaaaaaaaaaaaaaaaaaaggggaaaaaaaaaaaaaaaaaaaaaaaaaaaaaaaaaaaaaaaggggcgcccgttttaaagaatccaattttacttacccgtccttgcaacgtaatagtttttttatagaggcccctaatttaaatt

SEQ ID NO: 6011 - DNA, 185 bp, Lilium asiatic
  modified_base (41)..(41): a, c, g, t, unknown, or other
gacaaatctgtgggcatagcaactgtacaagtgtgcctcanatttcaggcctgaccgaggagtggtaccttgttgaattaacatttatttaatacgagataatgcaacaatggagcaacacatatgctacccctagaccatgaaagagtccagaggagaaggttagatcatagcctttgataaag

SEQ ID NO: 6012 - DNA, 105 bp, Lilium asiatic
aaaaaaaaaaaaaaaaaaaaaacaatataaaaaaaaaaaaaaaaaaaaaaaaaaaaggggaaaaaaaaaaaaaaaaaaaaaaaaaaaaaaaaaaaaaaaaaaaaa

SEQ ID NO: 6013 - DNA, 277 bp, Lilium asiatic
ggtacacgctgccataccccaacacttctaaaacactgcgatcgctctgctcgcgcggaaggtcatccccaacaacatttctattataaagtcattgaagtaaggcttttactaacgcttaaaatacatactatacaacgtcatccactgctaaaccctctcgttacccaacttaaacatcttgcatctcatacctgcctaaacaaatgaagtaacaactaaggcccgccgctctatagcatccaagcttacatacacgcccatgcagactcataaa

SEQ ID NO: 6014 - DNA, 377 bp, Lilium asiatic
aagctttggaactgttctctaaaatgcaggaagatggtttaaagccaaactcagggaccttggttgcgattcttaccgcttgtagtcattctggcttagtgtctgagggttacagaatttttgaggaaatgagaaaaagctacggtgttgaaccacaagtagagcactacagttgtcttgttgatcttcttgcgcgatcagggaggcttaacgaggcactgcatgtgattgaaaggatgccattgaggccgagtcagtcgatgtggggagccattttaagtgctagtagaggtcaaggaaatgttaagcttgcagagactgctttggaggaacttctaaagctggaacctgaagaaggtggtggctatgttctgatg

SEQ ID NO: 6015 - DNA, 92 bp, Lilium asiatic
aaaagttccttttaatttcaaactttataaggaacttttaccatttcaatatcagagcagaaatggtaaaagttccttttaagtttgaaatt

SEQ ID NO: 6016 - DNA, 122 bp, Lilium asiatic
aaaaaaaaaaaaattaaaaaaaaaaatataaaaaaaaggcccacctatctaaaagcggccgaacttacccacacattcatgccaccaaatacactgtcttatactgtcacttaaactcaatt

SEQ ID NO: 6017 - DNA, 389 bp, Lilium asiatic
tatttctttgccaatagatgattcgaaaagtgacgttcctgctgaaattgatgatggaaaaaaagaagttcctgctgaaattgatgatccggaaaaagaagttcctgctgaacttgatgatttgaaaaaagttcctgctgaaattgatgattcgaaaaaagaagttcctgctgaaataaatgattcggaaatagaagttcctgctgaaactgatgattcttgtaaaaccggtgccagcattgttctcgatattctaaacgctgcatttgagtctattggttctttgcctgaacaaggaggaataaagtcgttcgcagaagctgggaactcagtcatggcattggcagcattcttagtacgcttggtggaacctgagaccattacaacct

SEQ ID NO: 6018 - DNA, 218 bp, Lilium asiatic
aaaaaactttcgagcaaaaaaaaaaaaaaattaaaaaaaaaaaaaaaaaaaaaaaaaaaagggaaattataaaaaaaaaaaaacttacatacaccggcctgccgctttatatagtccaagcttacttacccttacttgcaacctctttactcttttttaatgcgacctaaattcaattacctggccgttatttaactacatcgcaattgggaaaaccc

SEQ ID NO: 6019 - DNA, 184 bp, Lilium asiatic
aaaaaaaaaaaaaaaaaaaaaaaaaaaaaaaaaaaaaaaaaaaaaaaaaaaaaaaaaaaaaaaaaaaaaaaaaaaaaggggaaaaaaccaaaaaaaaaaagggggggcccgttttaaggaaccaaacttacctacccctgccttccaagtaataactttttttttggggcacctaaattcaatt

SEQ ID NO: 6020 - DNA, 135 bp, Lilium asiatic
  modified_base (38)..(38): a, c, g, t, unknown, or other
  modified_base (40)..(40): a, c, g, t, unknown, or other
gaactcattagtaaagatccccctttccttcattcatncntttctttcccacacataccacatcaaaaaataagaaataatcccaactaaaataaagggcccccccctttaaaaaacaaaaacttaattacccaa

SEQ ID NO: 6021 - DNA, 237 bp, Lilium asiatic
  modified_base (1)..(1): a, c, g, t, unknown, or other
  modified_base (46)..(46): a, c, g, t, unknown, or other
natagcccacggaacgatattgttctattgtcccctaaagacacanccgcctggcatagcgtctgcttcccatggacttatgagcactgaattttattgcctcccatccaggatgtctgagcgaattagtttgttgccgcaccccccttttacaccattgggtgaactattatgggattaggactccatatacctacattatctgctcatgcatctgttccaaactcgtttacagcc

SEQ ID NO: 6022 - DNA, 232 bp, Lilium asiatic
cttggtctggagagatggttaacctttgctgagttgtgggagagatgatctgacttttggtggttggatcttttctagtatattttgtagcgctgcatttaggagttatttggtggtactcttgtgtgttggaaaacctagttctggtttatgtgtctggtcctgttttctattatatgctgttggatttgtcataaaagatattgttagagaattttataactctgcaaaa

SEQ ID NO: 6023 - DNA, 173 bp, Lilium asiatic
ctcaaactctcttccacttctcctccctcttattataagacaccaacactgaaactacagacattttatctcatcttccaacgatttcttacactaaacacctattcccataaccaaatcaacacttactacatttccataatttacaaatttcccgttaccttaataaaact

SEQ ID NO: 6024 - DNA, 209 bp, Lilium asiatic
  modified_base (1)..(1): a, c, g, t, unknown, or other
ntcttttccactttatattactaaatactctgttcaaaacccacacttatcaaactcacagagacttttccatatactctccacctccccacaatactcacttcctcctccacatttctacctttctcactacaaaccttgatactattactaacacaaactcaaatcaaactgtcactattatcctctcaataactcccaccttttcc

SEQ ID NO: 6025 - DNA, 96 bp, Lilium asiatic
gttctagatcccagccggccgttttaaaggttccaaccttacttccccttccttccaagggcttacttcttttttagggcaacctaaattcaatta

SEQ ID NO: 6026 - DNA, 304 bp, Lilium asiatic
  modified_base (9)..(9): a, c, g, t, unknown, or other
gagttgganggagctctacgattgaagattttgttcgtcgacgtgcctactactcgcatgtgggatcagcagctaatgagggcaatgcatttatgcggtaagttttccctttgcaacagtgtttgtataatttgtctgaagcagagttgatatgcatgtttcctcaagcattcgccgtgtatggttcatgtattacccgactgtggtggggatactttttactggttggatggcgtgtcaatagtgctgtgggggtattattaaaggaataggcttgatatataatatgttcataagttgcttc

SEQ ID NO: 6027 - DNA, 382 bp, Lilium asiatic
aagctcggagtttccgatgggtctgagatcctgcttgattatggtggttatcatggttctggcagtgactgcctctggtattgcccaagagtatgaaataccagatacaagttccccggaagtctaccagatcgactacagagggcctgagacacattctttcttaccacccccaaggcgatcgggtccaaagtctatgccttcgaggaattatatcggtcatgctgatactagagctattcatggatagatagcagtacgtggagatgctgatgaaacagctgtgatcgaaaccaacattctccatgttgagttaattgtagagcagagaaattgagtttactctctactcacatatatatgcctcaaatatatgctaatc

SEQ ID NO: 6028 - DNA, 328 bp, Lilium asiatic
gcgagaactggatcagcaccatccttttgctgggcccgctcgtcggcacctacagtggtgtccagtggtacgaggagaaggagaagcaggcccataggtactgagattcatcctgtgtcggtcacaatgtggcatcctcgttggtaagctctgtggtattgcagacgtggttgtttttttgtgtttgtattttgtagagagtgaatctcatactttgttgcaccggtagagattgtctggaaataaagaaacagttgtctgcattgattcttaagtcaagagattgtctgaattgattatgttgtggtaacttgcattaagcagatta

SEQ ID NO: 6029 - DNA, 164 bp, Lilium asiatic
tatctacaactttcgggtctccgacgaggttagtagcctctgtgatctgaaccaacaaatgtcccgtttgtgttgactagggagggcacttagtctgtatttttttgcccagcacactataaaagcttttttactcatattggtctttttaattaccatattaa

SEQ ID NO: 6030 - DNA, 273 bp, Lilium asiatic
atcaaagagaacattggatcaaaagatgacagagacgtatctaagaatgatgaatggtgaagacttaacctgatctgatgtatagatggaaaattaagtcctgatcacccttccatatttttatttgcaagatttgttatagtgccagaattggagattattccaccgccccacatttacgtagggatccatttaaaaaaaaaaaaaaataaaaaagaaaaaaaaaaaaaaaaaaaaaaaaaaaaaaaagggggaacaaaataaaagaacaaa

SEQ ID NO: 6031 - DNA, 287 bp, Lilium asiatic
gcggcgccctttgattcaagcatgagagttgcattgcttccgcttcttaagaactgttcactttcttctacatacagacttgtggtataccaaagatagtcagtagaatcttttgtggtattgatatgatcaacaaatcctgtgttggcaaagtcagcttccccccaaactccagacttctccgtgaaaatactccactggagatttcttgaattattatatggaggcagcatttgctgttgcaaaatttcaggtaccatttccacaattgaagtttgagattgaac

SEQ ID NO: 6032 - DNA, 61 bp, Lilium asiatic
  modified_base (9)..(9): a, c, g, t, unknown, or other
  modified_base (11)..(12): a, c, g, t, unknown, or other
aaaaaacanannaaaaaaaaaaaaaattttaaaaaaaaaaaaaaaaaaaaaaaaaaggggg

SEQ ID NO: 6033 - DNA, 205 bp, Lilium asiatic
aaaaaaaaaaaaaaaaaaaaaaaaaaaaaaaaaaaaaaaaaaaaaaaaaaaaaaaagggggaaaaaaaaaaaaaaaaaaaaaaaaaaaaaaaaaaaaaaaaaaaaaaaaaaaaaaaaaggggggccccttttaaagaatccaagtttacgcccccgggcttgcaacgaaatagtttttttatggggcccccaaaattaaattcat

SEQ ID NO: 6034 - DNA, 198 bp, Lilium asiatic
gattgtcctaagcatcaagggcattgtaaaaccaacttgtatccaacaaataaagttcttaaattgttttgggtgattttgaccattcactgcctacaatgtagtttccgcattactgcatccggtatgcaaacacaacttacaaagtatattgtcctgatgtattttaatttaaataaatgatggtaacacctaaaa

SEQ ID NO: 6035 - DNA, 323 bp, Lilium asiatic
gcttactcttgggagacttgggcttcctcttagacgagaaacaacatccacagcagcaccactttggccagcagttgcaagtcctcgtgggtggcttcttcgtcttcggagcatcaaaaccaaagagtgcttgccttcgaaacacacatcccgtgccaacataaattggcccttggatgccatcaaggcccttcatgttaatatcaaagaaaacaatgttccgatttgcatatcgatcatgtcgatcaataccatcgaacctgtgggggaattggacatagcacactttctttccgactagtgggtccatcatgaagcacatt

SEQ ID NO: 6036 - DNA, 358 bp, Lilium asiatic
agtacaacccacctctctatataatttatacttacccacacaaacattcaacacctgtgcttttttataatatcacctaaactcaatttactgtccatcattttacaacacttctactgataaaacccagtcctaacccaacttaatcgtctttcaacacatccaacttttaataccattaccaataacaaataaatcctcaccgatcaccctttccaacatttacacagtctgaatttttaattctacgcgccctgtatctaaccataattctcttccctttttacttttatgctcatgattacccctacactatccaactcccttacaccctctccttttacttaatttctttctt

SEQ ID NO: 6037 - DNA, 190 bp, Lilium asiatic
  modified_base (13)..(14): a, c, g, t, unknown, or other
cccacgcgtccgnnaaaaaaaaaaatttttaaaaaaaaaaaaaaaaaaaaaaaaagggggaaataaaaaaaaaagggggggccgttctaaaaaatccaaaaaaaaaaaacacatacgggcggccgctttaaaggatcaaagtttacctacacttgcaatcaatggcatagctttttttatagggccacat

SEQ ID NO: 6038 - DNA, 303 bp, Lilium asiatic
  modified_base (291)..(291): a, c, g, t, unknown, or other
  modified_base (293)..(293): a, c, g, t, unknown, or other
  modified_base (295)..(295): a, c, g, t, unknown, or other
  modified_base (297)..(299): a, c, g, t, unknown, or other
gcagttcaagtggaggaatgggtggttctattcactgacagagaagtcgatagctgagggtgagccagatccatgtccccttcatacagcctggctcaaagaactcaggatcatttaggtggtcatcttggcaacatcacttttttttatttttatgtaatcggttgagaaattatgtcacggagcttctgaatgaagttttcattgtgtggaatcaacgaactggcttgacagtcagtgtatcgattcttgagctgaaacaaacttctttttaaaggattttcatgagtnananannnaaac

SEQ ID NO: 6039 - DNA, 310 bp, Lilium asiatic
caaaactatacctacttgtagcaacacaattgaagaagcatataacatgaagcacaattgcgactatcaatagtattcaattcattgcgctgaccagctcaaatcaagaacatttaacaagatattcataaacaaaacatacagtggtcggattgttgctcaacacatggatccaatgagtctaagcacaatggatgcatcaactagagattgccagagttgaagactctgccattttcattatgctagctcactgaagatacaataatctcaacaacttcaaaatcattttacttcaacaaactgaatc

SEQ ID NO: 6040 - DNA, 96 bp, Lilium asiatic
acataaaaaaaacgggcggccggtctaaaggatccaagcttactaactcttccatgctaccgcctagttctactatagtggcacctaaattcaaac

SEQ ID NO: 6041 - DNA, 223 bp, Lilium asiatic
gcctaaaaatatctatttttccaaagtgtggcttgtagaatataggagaaaatgatgagtgggtttaggttgtgtaggctctcaatgctgaaacattggaagactggtttacaaaaagatggagggaaaaatgacctatcaaatatgcagactggtgctggaaaatgatacccacatgcagagtttttgaagatatgagacggaagaaataatcaaattatcc

SEQ ID NO: 6042 - DNA, 94 bp, Lilium asiatic
ttctacatcgcgtgtggactttctagaggagtttatcttacgaacgcgtgcattcgacggcagggctgttctatagtggcacctaaattcaatt

SEQ ID NO: 6043 - DNA, 71 bp, Lilium asiatic
  modified_base (1)..(1): a, c, g, t, unknown, or other
  modified_base (8)..(8): a, c, g, t, unknown, or other
  modified_base (15)..(16): a, c, g, t, unknown, or other
  modified_base (20)..(20): a, c, g, t, unknown, or other
  modified_base (26)..(26): a, c, g, t, unknown, or other
  modified_base (30)..(30): a, c, g, t, unknown, or other
  modified_base (37)..(37): a, c, g, t, unknown, or other
  modified_base (40)..(40): a, c, g, t, unknown, or other
  modified_base (44)..(44): a, c, g, t, unknown, or other
  modified_base (46)..(47): a, c, g, t, unknown, or other
  modified_base (49)..(49): a, c, g, t, unknown, or other
  modified_base (61)..(61): a, c, g, t, unknown, or other
  modified_base (65)..(66): a, c, g, t, unknown, or other
  modified_base (70)..(71): a, c, g, t, unknown, or other
nagagganccaagcnnacgnacgcgngcangcgacgncanagcncnncnataggggcaccnaaanncaann

SEQ ID NO: 6044 - DNA, 435 bp, Lilium asiatic
  modified_base (12)..(12): a, c, g, t, unknown, or other
gacccacgcgtncgcccacgcgtccggagccatggcgtcctctacttcgccaccgttcaccggttaactcctccgcccatcgccgccatcttgcgccaccacacctgcacctgcagtgagagcgacgtccacgacagtgacgtcgatgaagtcgacgtccactcctcaagatccctcctctccaaggcattccatcgacggcgacatcttcattgttcaccgaccactccctcgacagcaacgtccaccgacggcatgaagaagacttcctcttcgacaacgacggcagagctcctctctgccgtcaatcttcgtctacttcgtctgcatgcaagccaagaagcctccagaagaatccagtgaagcctcgagggccgtccgatcttcaaagctgctaaataaggtaagaacctaatagaattgggactgatgctt

SEQ ID NO: 6045 - DNA, 304 bp, Lilium asiatic
ggcagaaatatatgcctggatgaaagacagattatgcaaatcttgattatgttgagtgcctgctattcacctttcaccactttgctcataagactccaaactcaacaaacagtctctgtggttataagatcgataccggccaaccatctgatagacttggagaggaattttccgaaaacaataaagaattcactgagaggtattatttcttcctttcagatggtcacacatgtttattgagtacttgagataaatgtaactagaatttctcgaaatggaagtattacaaatttaacttgaaaaa

SEQ ID NO: 6046 - DNA, 84 bp, Lilium asiatic
  modified_base (13)..(13): a, c, g, t, unknown, or other
  modified_base (30)..(30): a, c, g, t, unknown, or other
  modified_base (34)..(34): a, c, g, t, unknown, or other
gcgagcgggcgcncgagaggatttaagctnacgnacgcgtttatgcgacggcggggctcttctatagtggcgcctaaattcaat

SEQ ID NO: 6047 - DNA, 222 bp, Lilium asiatic
  modified_base (12)..(12): a, c, g, t, unknown, or other
  modified_base (24)..(24): a, c, g, t, unknown, or other
gacccacgcgtncgaccacgcgtncgggagaaatgtgacagaaagtgttatatgagaaaatacgttagaaaaaatgctaggagagaacatgtgaaattgacgatgaagttcagcttgtgttacctaccatacccaataaccaccgactatgagtatatattcaacgaaaattaggaaacataacatcttcaaaaaaaacatgggacgtgtgtattgaatact

SEQ ID NO: 6048 - DNA, 364 bp, Lilium asiatic
  modified_base (12)..(12): a, c, g, t, unknown, or other
gacccacgcgtncgctcgtgttcatgcccaacgctacactgtcgcctatcaggagccgatgccagtagagcaactcgtccagtccctctgcgacacaaagcaagggtacacccaatttggcgggctccgacctttcggtgtctcctttttgtttgcagggtgggacaagaactttggcttccagctttacatgagcgatccgagtgggaactacagcgggtggaaggcggtggctattggcgcaaataaccaggctgcacagtcgatgctgaaacaggattacaaggacgaggtgacgagggaggaagcggtcgagcttgctctcaaggtgctgaggaagacaatggacagcacgagcctgact

SEQ ID NO: 6049 - DNA, 132 bp, Lilium asiatic
tcacggcacccgtttaccctctatcacacgttttagatggattccaacacgcgtaaaggtggaatgcaacagttgctagctggggaacacgaaactcagcacatcgggaatgctgcaaggaatgcaaaaact

SEQ ID NO: 6050 - DNA, 145 bp, Lilium asiatic
  modified_base (9)..(9): a, c, g, t, unknown, or other
cccacgcgnccgtttaacttttgcagatgatttgataaatgggtgtcatttattgtgtttcggagagatttttgtaacatgattatgtatcaatcataccttgttagaaaaccaattttaaatgctaatatccacttcgcaaaaa

SEQ ID NO: 6051 - DNA, 169 bp, Lilium asiatic
cccacgcgtccgtttgcattgtggtaattattttgatgtttgagataaataagtcacaataatgtgatttatttaattatccaacacacaactaagtgaattaaaaaagacataatattgtgacttatttgtcttgcattgtggtaattattctgatgtttgagataaa

SEQ ID NO: 6052 - DNA, 287 bp, Lilium asiatic
ggcaagagtaggaagatcctgactgcattgtccaaaagaatggacaagaacaagtggatcattggtggaatcatactcgctctggtgcttgcaattctactgatcctctacttcaagcttgcccgctgattggtattcatgggaaaacgttcctcttgtatgtttgggtgtgagtgcagatctggtgtacatgttttcttttcttctccggagtgatgagctttgcgtgtaataaaattcttttaacttgttactgaaatattttcatggattggttgccattaaaa

SEQ ID NO: 6053 - DNA, 80 bp, Lilium asiatic
ttataaagaatccgaggttactgacgcctccatacgacatcatagcttatttatagccccacctaaattgaactcactgg

SEQ ID NO: 6054 - DNA, 340 bp, Lilium asiatic
taaactcccaccctaaaattgctctcaatgatcaggacgatgaaacctatactcctgtttcaagcgttcgggcgcatttaggccttgcgttgctcgatattgacgatgacgatgatgcctcaactgctagctcagaacaaaacaatctgagttccttggagatgtaccttcagggtcgatgtagccgttcctcgagctttgattagctaccaatttgtcattcacacgatttcctccattttgcttgtaacatttatgcatgcccgtgtaacattgtacagtggttgtgtggttgaataattagcagaggctgtgaagcagcccgcagattatgctgaaa

SEQ ID NO: 6055 - DNA, 326 bp, Lilium asiatic
accgggggaaccaaacggacaaacgccggcccgccaccgaaaaacgccgcgaaaggggaaacccaaggcaaaacacaggccggccggggaaaaacaacagaccgggaaaacaccggcgggaaccaacaaaaaggccgggcaagacaacccccccaaaacagggggcggcagaacggaaaagggggcaccccccggaccggccaacaaaaacccagcccgaaaggggaaaaggacaccccccccaacagccccacaaacaccgccaaaggggggggcaaccccaaccggacccgccaaaaaagccaaaggcccaaagaccccccccg

SEQ ID NO: 6056 - DNA, 152 bp, Lilium asiatic
gtgcatatgatccgattcataatctgagtctcaaattgtttagttttgtaagcttaaatttacttgtgttgttgcacaaatttaacttatgatagattattatgtgtattgaatttgtgaatgcaaagctataaatacttctgttaagataa

SEQ ID NO: 6057 - DNA, 208 bp, Lilium asiatic
tcgcggacgcgtgggaaaaaaaaaaaaaaaaaaaaaaaaaaaaaaaaaaaaaaaaaaaaaaaaaaaaaaataataggtctccaatctggggggtccgttctataggacccatgcttgccccctcttgcatgccacaatttagctcccttatcgtgcgacctaatccctcttttttggccggcctttatcaaaatccagtggggtaacc

SEQ ID NO: 6058 - DNA, 120 bp, Lilium asiatic
cggacgcgtgggaaaaaaaaaaaaaagtttgaaaaacacacaaaaaaaagcgaaacaacggcgccttttcaaggcgcaaacggccaaccaaaccaagctgaccaaacctgaacagccggc

SEQ ID NO: 6059 - DNA, 89 bp, Lilium asiatic
  modified_base (84)..(84): a, c, g, t, unknown, or other
tatagagatgttatttttgtaattctatatgatggctagcttattaggtttgatgtggagaattataaggataatggttcagtnaaaaa

SEQ ID NO: 6060 - DNA, 199 bp, Lilium asiatic
ccatagcggtgctcaatttcgccatcgccctacctgccgcacaggcgcaagcaccggctccagcgccgaccagcgacggcactacgatcgaccagggaatcgcatacgtgctgatgctggtggcgcttgtgctgacatacctgattcatccattggatgcattgtcgccgaacaagttgttctgatatttacattgtag

SEQ ID NO: 6061 - DNA, 338 bp, Lilium asiatic
tatacctctcctcccaaggccccacccacgacgagattgactttgagttcctcggcaactccaccggcgagccctacaccctccactccaatgtgttcgcacacgggaagggcaaccgtgagcaacagttccgcctctggttcgaccccaccaaggacttccacacctactccatcctctggaaccccagacacatcatcttctccgtagacgggacgcccatcagagattacaagaatctggaatctaagggcgtaagcttcccaacaagccagcccatgaggatctactccagcctgtggaacgctgacgactgggcaacacaaggcggccgggtc

SEQ ID NO: 6062 - DNA, 211 bp, Lilium asiatic
gatcgagagcgggcggtctagagggacgattcttgcttacgcgcgcgtgcatgcgactagctatcttatagatagtgttacctaaaattaactgaccggccgtctacatacaacggactgactgaacatacccggtccccaccttaattaatcggcatgacatacatctctcgtcagctggcttgctaattaacaagcaggcaccgatcga

SEQ ID NO: 6063 - DNA, 95 bp, Lilium asiatic
cccacgcgtccggcccgcggtcgatgtagagggcccacgctcacgtgcgcgcgcatgcgacgctatagcattgtgatagcgacacctaaattcaa

SEQ ID NO: 6064 - DNA, 221 bp, Lilium asiatic
cgattatcacacatgatcaacatgaagacaagaactcaactaaattgatagaaaggaaaagaattagagaaggatacaaagactaacctctagattgccaaatcaattcagagaagaactgtggaccaaaaatagtcttaaaaaatagaatcagccggaatttcgacatttactaaatatctagaattggcggtttgtttaattatacttgtaagtaaaaa

SEQ ID NO: 6065 - DNA, 405 bp, Lilium asiatic
cagcagtactttgcagaccctgtcacgctatttgtagtccaaatgattctaatggggtgggttgaggggaggagatgggctgacttcatcaaaccaggcagcgttgatattgagcccaagttcccgaacaggaagaacccgacgcctgatgtctgataccccggcgggttatggtttgatccgcttatgtgggggcggggatcccctcagcccgtgatggtgttgtggactaaagagatcaagaatggcaagttggcaatgcttgcctttttagggttttgctttcaagctgtttatactggagaaaggccactttgagaacttgtcggtttacttagcatattccgggcattgcaatattttttcgggcttttcatcactttaaagaacccaaattacttttat

SEQ ID NO: 6066 - DNA, 202 bp, Lilium asiatic
gcgcgatatgaggatgcacgcttacgtactcgtgcatgcgatgtcatagctcgactataggggcacctaatatcaaatcactggccttagggtgacaacgacgctactgggaaaaccgccgctgctcctaactgaatactgctcgcagcgcattacacatctagccggttgtcgtaatacgccaagaggcccgtacctgatc

SEQ ID NO: 6067 - DNA, 121 bp, Lilium asiatic
aaaaaaataaaaaaacacattgaagaaaaacttagatggggcggccgctctaaaggttccaagcttacgttcgcgtgcgtgcggcggcttagctgttctatagtgtcacccacattcattc

SEQ ID NO: 6068 - DNA, 263 bp, Lilium asiatic
gacggagataattattgactcctgctgtgcgacttttgcggaagttcagaagaggggaaaggatttttgggcggagtttgagttgtatactgcacatcttttggtcggcgtggttgtcaatgtggctttagtgggaatgttggcaccgtatgcacgcattgggaagccggctactgcgaatggattttttggacgcattgcatgtgcttatggtagtctgccaagcagtgttttcgaagctgaaagaccggtatgcacatatc

SEQ ID NO: 6069 - DNA, 359 bp, Lilium asiatic
gcggatatagatggtaaggggtgcggtgacacgttgagcgctaatcgaggccactaatgtaggtgaagctgaataagttattggtgaaaggaaaactgatgctgccggagttgaaaatgaataggaaggaatgttgctggagaaacttgacggcggggggggatggatgaagcagacgactacaaccccgacaacgtcggtagctggcgacaaccggcgatggcgggctgattgtggatcagttttagggcaacaagcggacctgtcatcatgagagttcattgtggagaacacgatcactgaggaatgctgaagatggatgttgaaggatgttggcaatggatgtcgagagattctat

SEQ ID NO: 6070 - DNA, 78 bp, Lilium asiatic
gcgcgcactggaggatccaagctgacgaacgcgcgcatgcgacttgaaagcgctgctatagcgtttcctaaatggaat

SEQ ID NO: 6071 - DNA, 144 bp, Lilium asiatic
atgccactgccccatgccgaatctgggtggcaatctaattccttggcaaagagtgcgcaacccaaccaaacggctgtatcaaatgctaatacgcccagtatatcaagcagaccagccgcaaacaggcgaaaaaaaagaaaaata

SEQ ID NO: 6072 - DNA, 152 bp, Lilium asiatic
ggcgattgggcagaagatgaggcgtacggaaaatcaaacgacgaattggttttagatgactatgattgattagagtagattatgggtgcgagtagcacgaggtgggaagcacttgatccgcacttatatgtatatataataaatttgacaca

SEQ ID NO: 6073 - DNA, 377 bp, Lilium asiatic
aagcgctctaaattacctggatggatactgtcgcatttgcgtgatgcacacctcaatcttagcacagatatggccttgcacatagcacgagagttcctccgaaggatggcccagccctatgacaaggctggtagtggcgtgaagaagacattattaacacaagaagacttggagaagatggacgggagctcaatggacatgttttgagaaagcggtggtatgtggaaggctgagaagttttgtatccagactaatgaagagtctcttttggcccattgtagttgggtttgcaattttatctatcaaataggtgttgatactccttgcaactcgattagcttaatggaatgaccttcaaaatatatattttttttact

SEQ ID NO: 6074 - DNA, 327 bp, Lilium asiatic
ctgcatacgtggaagaacatccgggtggtgatgctatattgaacaatgctggacgcgattcgactgaaggcttttacgggccacaacacgccacccgggtctttgatatggttgaagaattttatatcggggaattgaagctctgaggatgagactaccgtctttggaacttagatctagcaagtccatgtattgaatgctttagtagtattatttatcttgatttttattttcgaatcaaacaatttggtagaaactggtttatatgcagtgttgtaatttacattgttgtagtccagacaacatttgtatgttccgtttctgaga

SEQ ID NO: 6075 - DNA, 358 bp, Lilium asiatic
aaaagcttcaactggatcgtgggacactgtttggggcagtgacggtgttaatgggtccaactgaggaatatacagggaagtcgaagatcgattgtcccctttggtctgaaagtgagggtatgaatgattacaccctccatgatcgttatagaaaataagcggtgtgcaggacatcatgtttgtgtattctgtacttttagatgtgtacttgaaagatgttcaagagtcggcaaatactgtatgctatgctcggagatgctcaatgaacaaaagctgtctgtaagtttttattttagttgtgtgcttatgaatatcttgtaatcggagtactttatttaagttgtactttcatgtttaa

SEQ ID NO: 6076 - DNA, 242 bp, Lilium asiatic
cagtaaagaagtatgtatgcctcttgcctcctttttctttctttgacgtagttggatttgttttggttaataaacttaacatgctactctagtttcttttatagtgtttgttggaagagttaatgtgactattgtactgagattctcatagttaccacttcagctagaagattaaatcgtcaaaaagatcaaatattggaaatctggaaaaaaaaaaaatatataaaataaaaataaataat

SEQ ID NO: 6077 - DNA, 130 bp, Lilium asiatic
agcatcgcgagcggcctgtctagaagatccaagcttacgtccgcgtgcatcccacgccgtagctctggtatagtgtcgcccacatggcgaacattggccctcttgctacgacaatggtactgctacgacc

SEQ ID NO: 6078 - DNA, 174 bp, Lilium asiatic
aaaaaaaaaaaaaaaaaaaaaaaaaaataaaaaaataacataattacgggcggccgctggggaagggaaaatgtttacttacgcatgaatgcggcgtgtttgctcttgtatagcgtgacctaatttcacttcactggccgtctttttacaactttgtgaccgggaaaacccagg

SEQ ID NO: 6079 - DNA, 139 bp, Lilium asiatic
gtatttatactctgatttccttttaagcttgaggagacattatttttcccacctctaaataaggcgaaccgccaaacggctaaattcggagactgtagagagagataatgttattttatgaatgtaggtttggtattta

SEQ ID NO: 6080 - DNA, 332 bp, Lilium asiatic
acgataccccttgaggattccatggagattttctcctgaagggggctcggatttcgtctccggaggacagaggagagccactactcagtgagcgtcgaggaacggccctagttcgtcgactctcactgagaggggggatcctcccagagcagttagtctaagattgggttgtaatttgagatgatcttgttcagctgtagtgtgatcgaatatgtctgtaagccttgtcatttctttctaagtttgtaagctactgtctgtactgagtgaccgtatgctgctgatctttcggattattaaagtaaacctgcttattgttttttttaaaaata

SEQ ID NO: 6081 - DNA, 305 bp, Lilium asiatic
cccacgcgtccgcggacgcgtggggaaattgtggatctataaaagatcgggaagatcatccatccagatatgcgagatcacagggggttgtccccctgggagagttgaagatcaagattagagtttagattagggtgagattagagagatcttgtaataagtgtgagttgtgagagatttctgattcgagttctcatgggatgtaatcttcttttcattctctgtgagcattgtaaggttttctgaactcatcttgatgtaataactcttttatattgaatgtaatgtgatacttttactaaaaa

SEQ ID NO: 6082 - DNA, 270 bp, Lilium asiatic
acgcggacgcgtgggcggagatgtatcggtctctgtttcagtggctatatcaggacctgttctgtagtttgatgctcgccgcacattctttcattcatgtttgggtgaggggaattggttgaaaagatggatactgtaaaataaatacaagttggtattgcccagatttgtgcatctgcgagtgctttatggttgtagtgcatgattgcatctaaatttgtctcatatcactgaattgataaacaaatattgtaggggagttttggactc

SEQ ID NO: 6083 - DNA, 292 bp, Lilium asiatic
acgcaagccttcttatattcatataatggatgactggcggattgtaaagacaggcgatagtgggcttgcaaaacagcttgagaaggaaggctacagggcggtgtctgcttcaaaaccatgataggttccaaatgcagacactctttacttagtttttgtgttataatcccttcaatgagtaatttccgaatatgttcagttaattaaacgtaggactcgtaaatattctgctaccaaaatgtatatcagttcaagttggattcttatttcagtgaggtcaaaattccaaaac

SEQ ID NO: 6084 - DNA, 215 bp, Lilium asiatic
cggtattatactactgctgtagcggtggcggcgacgtcgttcatggtggacaatgggtgtggtgttgtgccgacgttctgacgggcttggttgggtctctggcgagccggagctcgttgtaagatgtatgattttctttgcttctacctcctcttttgaccttgctaccgtgtatattgtttactgctttttaaatgaatgtttttcatccaaaa

SEQ ID NO: 6085 - DNA, 57 bp, Lilium asiatic
gtcttttgatgtccattggaatcttgccacctgtaaaaagaatggggtcacttgtga

SEQ ID NO: 6086 - DNA, 77 bp, Lilium asiatic
ccgttttaaagaatccaacctaaggtacccttgcttgcaacgtcatacctcttttatagtgtaacctaaattcaatt

SEQ ID NO: 6087 - DNA, 360 bp, Lilium asiatic
gagattctgactcggagtgcattacatggtccaccacgaatgactcagagcaggacttgaagaaatttcttgtgaatattttcttacagttgtaatttatctttgttgttagcgccatccaattattttaatggccgtgattatatttatgtaacattttttttcttgttacgtggctttttattttttatgtgtggtctcatttttcatgatatcaactccgtatgcttataaataatcgagagacgtagtccttgactacttaccttctcttaaaaaaaaaaaaaaaaaatgagggaaaaaaaaaaaaaaaaaaaaaaaaaaaaaaaaaaaaaaaaaaaagaaaaaaaaaaaaaataa

SEQ ID NO: 6088 - DNA, 386 bp, Lilium asiatic
  modified_base (254)..(254): a, c, g, t, unknown, or other
gtgctcaaagtgttggtttttatctgtgtcagcaatagattttgcatgggaggtgtgttgtgccagttatgggaactctcctttatcctgtccgaaccatttttattacttgtgtgacatgagttgattattgtttgctgagttatgtgccctttctaccctcataagtggatgtatccaattccaactgctgctattgttgatagtcgttattgttttatttgtcttcccttggatgaggtgtttgcctagtnaaaaaaaaaaaaaaaaaaaataaaaaaaaaaaaaaaggataaaaaggtcggccgttctatatgatccaaacttacgtacgcgggcatgccacgttatagcttttatatattgttacctaaattcaattcact

SEQ ID NO: 6089 - DNA, 88 bp, Lilium asiatic
acgaaagattcaaatctataacgctggtaattattcaggctgcagcaaaacctacacctaaaatgtctgtaacatatattgacataca

SEQ ID NO: 6090 - DNA, 369 bp, Lilium asiatic
acgaaagattcaaatctataaccatagaaattattcagcctccagcaaaaccgacacctaaaatgtcagtaacatatattgagatacatcagcacagtaaccaagttcaccgaggtgtagttgtatatgtgagattaaaaggtgcaataataacagttacgtgaaacaatagtcataaagattctaattacgatcatgatatatttagctacctataaactccagtaaattttctcaacccaattccatggcactgtaagctctgaagattcgccagctgcaactagttttcgttctcgatcattctccgaacatcttcgactactaaccatgctttgtggccaccaatcacctcgccaagtttctggg

SEQ ID NO: 6091 - DNA, 374 bp, Lilium asiatic
agacaaaaaatgactcaattctcactaacatgcagcttttccacagattttcagatattacaacactggaagagttgtctatctttctaacaagggcatagaaggaacatggatctcttcgccaaaagaaacataaattcaactgaatgatatttacttgaatgtcgaaaggcgggggagcttgtccctcagatagtacagccttgccctccgaaccttcctgtgactgacaactttgatctcctttatatttggtgagtataaagggaagacaatctccacaccgatccccgcaataatcctccgaatccgaatagtcgtgtgaatcccagcattctgcctcgacatcactatccccttatagagtgacaacc

SEQ ID NO: 6092 - DNA, 336 bp, Lilium asiatic
cttttcggaaagtaagaagctctctgtttcttccccatctcgtcttcaacatgaagtgctgggcagggcaaaatgaggggtgtgggaatcccaattgcagctgtggatccggctgcaagtgtggagacagctgcaagtgttgatggagagaatggaagggggtttgattcccccttaatctgtgaattgtttgctgctaaataagtggccattaagatgcaaactgtttgcatcatgaattgttgttctccatggcctatatggtttgtgatggatttgtgtatggagtggtctaaactacttgaataacgtatatatgtatgtgttggttgatgt

SEQ ID NO: 6093 - DNA, 280 bp, Lilium asiatic
cagggctggacctgtcgtggggcgagggtgtgtgggtggtggtgagtggggtttcaggtgacgagggaatggctttggggtttggtatcaacatatccggtcgatgggtcggtcgagaatgattaatacggagacgttgggggaaggagtaagggcagatactggcggagacgaagaaagctatgtcggcagcgaagcttgaggttttttctcttattgaccctgagtgagctaagacgtatgcttctattatcattgacaattgcatttcgatgattta

SEQ ID NO: 6094 - DNA, 407 bp, Lilium asiatic
ttcagcaaagcgtccatctgctccctcgtcttcgctctcctcctgctgctggcttctggtgcggaaatagcagaaggaggtcgaactattttctgtggaaaggttccaagcacagggtttcatgggctgtgcctgatcagcatcaactgcgcccaagtttgcataagcgagggctaccgtggtggcgactgcagcagctgtcgacgcctgtgcatgtgcatccgaagatgcacctgagttcggacttctctaccactatcttgaaatggagcttgagtcatgattggctacatcatcagtactgaatctgtattatgtattatccactgtatccgtattatgtattaagaataataacggggaagctcacgatcgtgccgaccatctcctgttgaatttcgagctaa

SEQ ID NO: 6095 - DNA, 340 bp, Lilium asiatic
gaaacagtaatatcacctatcctgggggatcgaaattactacattcccttgtgtgagaaggggttgcataaaatacacacacattagattctcttatctaggactgcacatgtgaacaggtccctaacggtaattcggacatacttattcaataagaaatttatagctccgtccacaatcacacagaacctctaatacaacaattcttcgaaaactggatcaacactgcatccccacttttaatcgtacaacttcaaaagcttttaagccggggtaacccttgtttaaaccacctaagtactttaatcaaaaaacccaccttttttgacccttttttttt

SEQ ID NO: 6096 - DNA, 270 bp, Lilium asiatic
aaaaaaaaaaaaaaaaaacaaaaaaattaaaaaaaaaaaaaaaaaacttaaaaggggggaacattataaagaataaggggggctccatatacgaaaaataactttggccgccctgtttaggcgatccaagcttacttacgcgggcttgcaacgtattattttttttttcgggttacctaaatctaatctcttggcaccccctttaacaacacccatgacttgtaaatccactgctttcccaaattttatcgcttggatacaaatccccct

SEQ ID NO: 6097 - DNA, 272 bp, Lilium asiatic
cgagaatgtgatccgtgatgctgtcacctacacaaagcatgcaccccggaagacaggggccgcgatggatggtgggtatgctctcaaaccccaaggacgcactctgtatgggttcggaggctgatcttcttctgcactgggatcgactgtgggggtatcgcttggtgttaggaagagatcttggtttctgctgtgagcttttggtggatcatgtttttaagtatgaaatgcaatttatcttttgcatctaaaaaaaaaaaaaaaaagctaat

SEQ ID NO: 6098 - DNA, 183 bp, Lilium asiatic
gtgctctaaatcattcactcactttttctaactccctccacaccgtaaccgagccgtccttattacaaacccaggggcctaacacatactttaatctccttctgcataaagacaagccatctcgaccacacacacacactccaaaaccaattgacttacgcacaagcatagactcctaaacac

SEQ ID NO: 6099 - DNA, 383 bp, Lilium asiatic
cttcggccacgcgttcggccacgcgttcgggcgtttaagaagattcatgtgaagctcgtgagggagtttgagaagaagttcaatgggaaagaagtgatccttattgcaaccccgaggattgtaagggccccaaaaaaaagctcttgccttattcggccttgtaaccggacactcactggttgtcatgaatctatcttggaagatgttgtgtaccctgcaaaaatttgtgggaagcgggtcagatatcgtcttgatggatccaagcttatgaagattttccttgatccaaaagagcgtaacaacactgaaaacaagctggagacgttttctggtgtctaccgtaagctctgcgggaaagatgttgtttttgagtaccctgtggc

SEQ ID NO: 6100 - DNA, 179 bp, Lilium asiatic
cccacgcgtccgaaaaaaaaaaaaatttaaaaaaaaaaaaaaaaaaaaaaaaaggggggaaatttaaaaaaaaaaaaagaaaaaaaaaaaaaaggggggggccgttttaaggatccaaagtttccggcccctgcctgggacgttttaattttttttttggggcccccaaatttaatttc

SEQ ID NO: 6101 - DNA, 185 bp, Lilium asiatic
gccggtgccttagcgcaagcactaagtcagcctcactccttccacacggagacctacctatagtgacgtcaaagccaggtgcttggacgaggtcgagggctccggcggcaagaaggcgagccgtccggtggtcacactgacgcttcaaaagggctgcgctaaggcgcaaggctagactccgaaac

SEQ ID NO: 6102 - DNA, 254 bp, Lilium asiatic
ggggttttcggcgggctcatgtcgttcgtgctcttctgggcatttgcttatgatattgtccatattttctgaggatcaagggctgctgctgcaacaagtttggaaagatgttccagaatatttatcataattttatgtttctggatagaatgacagaagatataattgactagtagtttctatatacaatgggtacttttctaattgtttcattacaaattattaggttgctatatacaatgtgtactttacta

SEQ ID NO: 6103 - DNA, 260 bp, Lilium asiatic
cagaggctgatatttgctgggaagcagctggaggacggtcgcacacttgctgattgcaacatggagaaggagtcgaccctgcaccttgtccttcgtcttcgtggtgggcagtaattcctcctcggctgttcctgtgtttgttctgcttctagttggtgtgtggtttcagtactgtgtgtgtggtggtttaataagaactgtgttggttggtatagcatgatatcaaccaaatttagaattcactgtgtttgtttaccaaa

SEQ ID NO: 6104 - DNA, 275 bp, Lilium asiatic
gatcaatccgtttctcttctgatggcaagttcatgctgatggccatcagggctccgcgctgatgcgaacgagaaatcgaaatgaccgcgtagatcctggacagtctttccagtattagcatccaccagtagtccctcggggctatctccgacaacgacgacaagtttccgatctggactaatcgatgtatggtttactggccactcgaaacggaaatgattacgaagctggaacttttcaacatcatagtctcgaactccagaatcattatttgc

SEQ ID NO: 6105 - DNA, 164 bp, Lilium asiatic
cccacgcgtccgggtagcatttttgaaacaaggatctgtgagctccgtggaaaaggtagaacgatagatctcatggattttacaagggcaactggtaaaacaatagcatgtaaaggtttttactttatcccagtccagtacagtgcgctcaccttggagacatc

SEQ ID NO: 6106 - DNA, 296 bp, Lilium asiatic
cggttgtaactttgatttgggtttgtgatttgaaatgtttatgaaggaacgtggtaaaaaaaaaaaaaaaggaaaaaaaaaaaaaaataaaaaaaaaaaaaaaattaaaaaaaaaaaaaaaaaaaaaaaaaataaattcatgggccaaaaataaaataaatttatttttaaatgtaataaaaattttaaaaaattaaaattgttttaattaaaaaaaaattttgttagttttttttaaaaattaaaaaaaatttaatgttttttctgtttttctttaaaaaattaaattttttttt

SEQ ID NO: 6107 - DNA, 582 bp, Lilium asiatic
  modified_base (149)..(149): a, c, g, t, unknown, or other
  modified_base (152)..(153): a, c, g, t, unknown, or other
  modified_base (155)..(156): a, c, g, t, unknown, or other
  modified_base (496)..(496): a, c, g, t, unknown, or other
aaaaaaaaaaaaaaaaaaaaaaatatataaataaaaaaaaaaaaaaaaaaaaaaaacgcggcctttttttaaaaaagaataaaataaataaaaaataaattttatttaattatataattataaaaaaataattattggggggctttttnctnntnnttttaatttatttttttttttttttttatttttatattatatttttatttttgtttatttatattttatttttcttttttttttttttttttatttttttattattattttttttttttttttatttttaattatttttttattaaatttatttttttttttatttttatttttttatttatttattatttttattttttttttaattttataatatttattttttatatttattattatttttattatattatttaaattttatatttttattcgctttattttattttttttgtatattttatttttttttttaatttttttttttatttatagccgnaattttattaaattttttttaatatttttctttttattttatactatttttattatgtttttattttaattttattttatatatat

SEQ ID NO: 6108 - DNA, 53 bp, Lilium asiatic
aaaaaaaaaaaaaaaaaaaaaaaatttaaaataaaaaaaaaaaaaaaaaaaaa

SEQ ID NO: 6109 - DNA, 117 bp, Lilium asiatic
gatcgattggtgttcttggtggtagaaggatagcgggattatacattgagcttggtggatttattttgtctgtagggattgtatgagactgttttctattattttattgaatgattt

SEQ ID NO: 6110 - DNA, 255 bp, Lilium asiatic
  modified_base (1)..(1): a, c, g, t, unknown, or other
  modified_base (56)..(56): a, c, g, t, unknown, or other
  modified_base (58)..(59): a, c, g, t, unknown, or other
  modified_base (61)..(61): a, c, g, t, unknown, or other
naaaaaaaaaaaaaaaaaaaaaaaaaaaatttttttttaaaaaaaaaaaaaataanannanggggggggggggcggctgttgtagaagaaccaagcttaccgccgccttcatacgacatcatagctttattatggcggcaagtaaattcaatgcgctggccgtggtaaaacaacgtcacggctggaacaaccgtgtcacaacccaaattactggaatagcacaacatcctctttttaacaggtgttgtaataaag

SEQ ID NO: 6111 - DNA, 281 bp, Lilium asiatic
  modified_base (64)..(64): a, c, g, t, unknown, or other
gcgaaggacatgttcaccatggactaccggtaccctctctttggcttttaaggccttcgccatntgtttgagtagctttgataccaagcttgcttgtgaataatatgtagcagtgagtagatgggggcccataacatgtcaaaggctactagtatgtcatgctcagaaattatgctactattgttgtaatatggcaccatctttttgatgtagtgattcactgtcattttcagtaatgccttctgtgtcataacatgtcaaaggcaactagtgtggccttg

SEQ ID NO: 6112 - DNA, 465 bp, Lilium asiatic
  modified_base (414)..(414): a, c, g, t, unknown, or other
cccacgcgtccgtactcttctctgggtctctacgaggaagagttggctaaacctgagtgtgtgaagtccttccctactatgaaatcttttgcagggaatttccagtctgatcaggatagtaactctttcgattattctcttgggcaaaacctagaggtaaggactccggagataatgtcacatcttactccatcgataactgaagtcaatgaatctgaattcctggaagatgcttcccctgcaaagaaactgattgaagaagagaaaaatgcagtgacagacggagacgccgcagcgaaactctctgaggagctctctctgtttgaatcatacatgaaattcatggatatcccatatcttgaagggaatttaagtgagtcgatggacagtctcttaggaaatgatgtaactcangatggggcgagtcacgtggagctgtggagctttgatgacatgcctgctact

SEQ ID NO: 6113 - DNA, 125 bp, Lilium asiatic
tggtaaccttgtggtagggctcgttgatgattaccttatttatgtttttgttaattatctgcttttgttttcaagtcctaacacgtgggccatatgcaacttctctcttttattgcatgtaaaaa

SEQ ID NO: 6114 - DNA, 269 bp, Lilium asiatic
  modified_base (60)..(60): a, c, g, t, unknown, or other
  modified_base (88)..(88): a, c, g, t, unknown, or other
cggacgcgtggtcgttttggtgtcagttgttttgtgttgttgagtgtcccaaacggttanggatgttacgtttgagggattgaattanagaaatgcatgttgaacttatttagataatttgttggctgctttagttggtacattttccttgaaatctgtattatgcattggtatatttttgctcttaatttactgtaatttttaaaaaaaaaaaaaaaaaaaaaaaaaaaaaaaaaaaaaaaaaaaaaaagaaaaaaaacaaaataaaa

SEQ ID NO: 6115 - DNA, 353 bp, Lilium asiatic
aacaaaacctcaacacatatatttgtatcctcaagaatatctaatgcatcactgacaaggcaaattcacaaatgtacaatgaaaaattcgcaaccaggcatccgacaactcaccgcaccatgaatctactcaaagcatcacgcagagttcgcaccaaaaaaaggcaatgggagaattccgttcaataaaatggagccatacacctttccctatggcagtatcaccttagcagtggcagcgtagactcttcccttgatttcttgctatagttggcatacaacaatagttgtatgatggccaagacagttccaatcccattgggtatataaataaagaagtcgtgcaatagcatt

SEQ ID NO: 6116 - DNA, 382 bp, Lilium asiatic
gttatagatcgctagtagattttctagattacttacgcttacatgcgaggggatgggacttctatagtgtgatatagagtcaattaactggacgtcactgtacaacgttttaaatgggaaaaactgggaaaaacctaacttaaccgaattgaatcacattgcactatatccagctgtcgtaagatcgaatagtaccgaacagatcggcattgataacagttgcgaagacttaatgaccaatggtacgcaccgtgaagcgccttattaagcgccattaatgtcgtgggtactcgcagttacacccatacacatggcagcactctagagcgcgctactttcggtttctttcctttttttttcttaatatatggcggcttttccc

SEQ ID NO: 6117 - DNA, 161 bp, Lilium asiatic
taaaagatccaagctgacatacacgtacatacaaaaacataacatttatattaattaaacttaatttcaattaaaaagggggcggcctttttaggggttccaagctataatccccgtctttcccaacttaaacctcttttattggatcccccaatttaaat

SEQ ID NO: 6118 - DNA, 213 bp, Lilium asiatic
gcttttccacaaaagtctgtcttggaggctacagcaactgcagctgttatttgaagattcttgatttgaaatgttaagtttgttagaatttttattcagtttagttttgcttctacattgttgggcatttgttgtttaaatgaataattagatttgcttttgttcttgtggcatcagttctgcaatggtaaaatatctttttgttgcgtaaaa

SEQ ID NO: 6119 - DNA, 326 bp, Lilium asiatic
gtttgaaataactaggttcgaaagaggaaggtggtaaggatagtgttggtgctttatgaatggagaagttatgctatttatggaaacatatccgatgttgcttgaactgatgttacagtgtatacatcctactggaatagtcaaaatgctgtctaggcttcttccctttttactgctaaatttattggaacagtaaacctggggattaggttctctgtaatttgaatgtatgtgtgcgtttttttacagactttatttataattataaatcgaaatgaaggaagaaaaaattgggggctgccggtctagaggatccaatcttactt

SEQ ID NO: 6120 - DNA, 233 bp, Lilium asiatic
cggacgcgtgggaatttggaacagaacttgaatatttccttcataagcattaattaaagttgatagacttgtgcctgaaaaaaaaaaaaaaaaaaaaaaaaaaagaataaaaaaaaaaaaaaaaaaaaaaaatgaatagaaaaaaaaaaaaaaaaaaaaaaaagggggcttttgggcggccgcactataggatcaaagctaaataactcttgaaaacaacataatagattttt

SEQ ID NO: 6121 - DNA, 98 bp, Lilium asiatic
cccactctacagcgcgagcggacggtcagcaggagccaaacaggcgggcgcctgggggccacgtcctagctacttcatagcgccacctaaatgcaatc

SEQ ID NO: 6122 - DNA, 204 bp, Lilium asiatic
ttttactatagaacctgtattctatgagctgctatttagacttttaaatatgttgagttacatttttttcttaaaaaaaaaaaaaaaaaaaaaaaaaaaaaaaaaaaaaaaaaaaaaagggaggacgataaaaaagaaaaaagaaaaaaaaacgcagagcaagcaacgaaaaaactcttataatagggacaaataaattcaatt

SEQ ID NO: 6123 - DNA, 368 bp, Lilium asiatic
ctgaagcagcactgcacgacagatttggggggctgagaatccattgaagaagacagtacaacaatgcaacatcttatgctatgattgtggcgatgacattataaggcttgctatatgacattataaggctttctttgtgcttgttaatattcgaatgtatgtgtttatgtcatctgcgaggcttgctatgtgacattagaaggctttctttgtgcttgttaatattcgaatgtatgtgtttatgtcatctgcgaggcttgctactgtgtatagattgattgtgaagtgtacaggcttaattcggctgacattgcctctgtgtatatattggttgtgaagtgtaaatgtagtattgatgtgattctcaa

SEQ ID NO: 6124 - DNA, 145 bp, Lilium asiatic
tatacaacgtggttctcgatcagtacgagtttgcacacgagttcttctccgcatcgtaagagcagcatgcgggagttcatgtaacaataaaccttctcgtatatttagtttattttaaacttaatgagtgcttatctggtgtctt

SEQ ID NO: 6125 - DNA, 226 bp, Lilium asiatic
cggacgcgtgggggtcatgagggggtttgttaaataaaatatctgtgggatgtatgtcagattacgagcatttatatgtaatgttggtgcacaattgaaacattcatgtacatatttacgtatttgtgcactatttaatatatggaatatttctggtggaggagcaattgcgcttgttcacttccagccacgtattaatctcaaaaagaaaaaaaaaattttatag

SEQ ID NO: 6126 - DNA, 270 bp, Lilium asiatic
gctgtcacctataccgagcatgcccgccggaagacggtgacggcgatggatgttgtgtatgcactcaagcgccaggggcgaactctgtacggcttcggcggctgaagggatgaggtttggtccaggactagggtttctgctttggcttagttgttgttggctgtctttgtagtatggtagggtttgtggagcgcgacttgtaagattgtcagatatcttatctgatatggtaatggagaagtttgagttaaaaaattaaaattgaaaaac

SEQ ID NO: 6127 - DNA, 346 bp, Lilium asiatic
gctccctgccctctatctcgttgagagcgcaactgtcggcatctccggcagtctcggcaggctgttgttttatcctctgttctttggttgcttgcatggtcctgatttcttcaggacggagattccggttgcggtgttgacatgtcttctggggcttacaaacgggtattttaccgccgtcctgatgatgcttgcccccaagactgttccgatacaatatgccgaaactgcgggcatagtgatagtgttgtttcttgttttcggcttagtagccggttcgctgatttcttggttttgggtcatctgattgactcacttgctctacactcacgtgtatgtaattcta

SEQ ID NO: 6128 - DNA, 331 bp, Lilium asiatic
ccacgcgtccgaggaggtgccgagaacaatgctgtggatggatatgtagggaataaaatgagttagagttctgcgctaatgctttcaacatgtattagctgaaatgaaaaattactgatgggtggttgaagggttatggagagaggctgatagagagaggacttgttcattgttttgctttttccagcaagatttttttttggaacttgtcccttgtgggattgagcatttaccaccctagtaaaacgggtgtaaaaaaagagtttgtgccaaaacaaaggctatttatgtgtgaggacatgctatgttttaattataactttcttctgtt

SEQ ID NO: 6129 - DNA, 282 bp, Lilium asiatic
tgctcgtcctcatgggaacagtggggttgtcagggccaagtttaagtcgaacctgccaccggaagcaatgggttcgaaggttagggtgtttatgtatccaagcaacatttgaggatgcatggatcaattgaatctgggtgaagttcttttgtcgtctgtttttcatttctacttagtagacatttaaaagaactttgttacttgattttgtagtgactgtttggttggttgagatcttagcttgtcttgagtaatttatttagtaacttggtttggttttaa

SEQ ID NO: 6130 - DNA, 388 bp, Lilium asiatic
cggacgcgtggcggacgcgtggggttctgggatgctttccatccaacggctgctgtgaatgtgatagtggcaaggagagctttcagtggaagcactgatgtggtgtttcccattaatgtagaacagcttgctaagctggaggagaaacccaattaggattgaagagtagatggaattagggcaatttgataatgttagtgagaggttctgtttttgtttaattgtgttgtgtgtgaaatctcaagtacgagggtggtttgattggatgcattgtagggttataaattaatgtattttacgggttccaatattattctgagaaataaaataattactcagaaaacacatctccctcacggggagttcatagcctttcaccaaatgaagc

SEQ ID NO: 6131 - DNA, 85 bp, Lilium asiatic
aaaaaaaaaaaaaaaaaaaaataaaaaaaaaaaaaaaaaaaaaaaaaaaaaaaaaaaaaaaggaaaaaaataaaaaaaaaaaaaa

SEQ ID NO: 6132 - DNA, 365 bp, Lilium asiatic
tatcaatgcgtcttatgaccgatttctgcgcaatggcaacccttacggccctggagaaaatgttagaccattgggtggcatgccaggtcgccctgtagaagatttgcgcatgttgggtgccggtgatggccggaatgtcggagttggaggtggcaggccagaactactccctcctgatgcctccaacacagtctttgtggaaggactccctgctaattgtacacgcagggaagtgtcccatatatttcgcccttttgtaggttttcgagaggtgagacttgtgaacaagtagtcccggaatcctggaggtgatcctttggttctgtgttttgttgattttgagtcccctagtcaagctgcagttg

SEQ ID NO: 6133 - DNA, 87 bp, Lilium asiatic
aaaaaaaaaaaaaaaaaaaaaaaaaaaaaaaaaaaaaaaaaaaaaaaaaaaaaaaaaaaaagagaaaggggaaaaaaaaaaaaaaag

SEQ ID NO: 6134 - DNA, 286 bp, Lilium asiatic
  modified_base (275)..(275): a, c, g, t, unknown, or other
aaggtggggtagcctcataaaggaaatggatgtttactataagatgttgtagaaaatttaggagaggttaaggcctaataatttgctactggatagaaatggatactttattatatttagtatcaagttgaaagagttatgtagaataatttagaagttatttttcgtaataaccataacactaattctgattgatgtccttgtagtttctttatgtactatcatcaacaatcataatattatatatatggaatgaaaatattatttttcatatnaaaaaaaacaa

SEQ ID NO: 6135 - DNA, 288 bp, Lilium asiatic
cgtagacaggaaagggagaacgctgctaccaatacaaaattcaataatgtttttgtaaagaatctctgagaatcaactacagaagatgatctgagagagacttttggtaaatttggaacaataactagtgtggtggttatgaaggaggctgatgggaaatccaagtgctttggttttgtcaattttgaaaatccagatgatgctgctcaagctgttcaggaacttaatggcaaaacctttgatgaaaaggagtggtatgtagggaaagcccaaaagaaatctgaaaaa

SEQ ID NO: 6136 - DNA, 330 bp, Lilium asiatic
gtggaaagtattctgtgaaaagaaaggcagtagggatttggggttgcaaagactgcgggaaggtgaaggctgggggtgcttatactctcaacactgcaagtgctgtcactgtgaggagcaccatccgtcgtctgagagaacaaactgaaagttgatcaagagaagcaactatatcagtgtccctagttttaactctaccctttcagtttatttatcttttgagaactatggtttaatgcagtaagaattgtcattcagagttttggtttcagtggtgttgtttctgaagcacattttagtcgtgactagttgatgtcttacttgatttta

SEQ ID NO: 6137 - DNA, 357 bp, Lilium asiatic
atatctgagattggtcgtcgggtgtccggtcgcgtcgggtgccgggcgtcgggaggaagaaacacgtcagtagagcgatcatcggggattactggatctttgccagggcccgtacgtcgagagagagccgatcgtgaccatacgtgggtaaaggccgaacacgcctgagttaaacgccatcaactcgtatccttttgctccttctacctttctgatttcgacggtgccatgatgccatacttgtcgacgaacagtgtcagaagaaatgggagtgccttatggttggagttattttgtaattcggatttggctgcttataacgcgtttatgattttaacggttctgtgctttttacga

SEQ ID NO: 6138 - DNA, 328 bp, Lilium asiatic
actcgcgaagtttacaataccgaatcttcatttattggtagcctcaagtctgttgatgattttcagcatcttgaagtaccttctagtgtgcctccaatttttgatgagcaaatgatggataaggatgttgtggtgcttaaagaaataacagaagaaaaagtagagccgatggcatgtgatgatggaaaggaaccaaaggatcctttagagaaggagcccaacacaaccaggaaacagaatgagaagctctatgcagttgagggcattctagatcctcgtctccgtaaagcagaaaaaaagcgcaggaaacgtaacatgttaagcacga

SEQ ID NO: 6139 - DNA, 97 bp, Lilium asiatic
  modified_base (9)..(9): a, c, g, t, unknown, or other
  modified_base (25)..(25): a, c, g, t, unknown, or other
  modified_base (27)..(27): a, c, g, t, unknown, or other
  modified_base (34)..(34): a, c, g, t, unknown, or other
  modified_base (41)..(42): a, c, g, t, unknown, or other
  modified_base (46)..(46): a, c, g, t, unknown, or other
  modified_base (56)..(56): a, c, g, t, unknown, or other
  modified_base (66)..(66): a, c, g, t, unknown, or other
  modified_base (68)..(68): a, c, g, t, unknown, or other
  modified_base (70)..(70): a, c, g, t, unknown, or other
  modified_base (72)..(73): a, c, g, t, unknown, or other
  modified_base (87)..(87): a, c, g, t, unknown, or other
  modified_base (91)..(92): a, c, g, t, unknown, or other
  modified_base (96)..(97): a, c, g, t, unknown, or other
cccacgcgnccggcgagcggccgcncnagagganccaagcnnacgnacgcgggcangcgagggcanancncnncgagagcggcaccnaaanncaann

SEQ ID NO: 6140 - DNA, 111 bp, Lilium asiatic
  modified_base (2)..(3): a, c, g, t, unknown, or other
  modified_base (5)..(5): a, c, g, t, unknown, or other
  modified_base (9)..(9): a, c, g, t, unknown, or other
  modified_base (23)..(23): a, c, g, t, unknown, or other
  modified_base (25)..(25): a, c, g, t, unknown, or other
  modified_base (39)..(40): a, c, g, t, unknown, or other
  modified_base (44)..(44): a, c, g, t, unknown, or other
  modified_base (64)..(64): a, c, g, t, unknown, or other
  modified_base (66)..(66): a, c, g, t, unknown, or other
  modified_base (68)..(68): a, c, g, t, unknown, or other
  modified_base (70)..(71): a, c, g, t, unknown, or other
  modified_base (89)..(90): a, c, g, t, unknown, or other
  modified_base (95)..(95): a, c, g, t, unknown, or other
gnncnagancgcgggcggccgcncnagaggagccaagcnnacgnacgcgcgcgggcgacggganancncnncgagaggggcgcggaaanncaaancacgggcccggcgggc

SEQ ID NO: 6141 - DNA, 164 bp, Lilium asiatic
  modified_base (9)..(9): a, c, g, t, unknown, or other
  modified_base (21)..(21): a, c, g, t, unknown, or other
  modified_base (33)..(33): a, c, g, t, unknown, or other
  modified_base (41)..(41): a, c, g, t, unknown, or other
  modified_base (43)..(43): a, c, g, t, unknown, or other
  modified_base (49)..(49): a, c, g, t, unknown, or other
  modified_base (76)..(76): a, c, g, t, unknown, or other
  modified_base (78)..(78): a, c, g, t, unknown, or other
  modified_base (85)..(85): a, c, g, t, unknown, or other
  modified_base (97)..(97): a, c, g, t, unknown, or other
  modified_base (103)..(103): a, c, g, t, unknown, or other
  modified_base (107)..(107): a, c, g, t, unknown, or other
  modified_base (114)..(114): a, c, g, t, unknown, or other
  modified_base (117)..(117): a, c, g, t, unknown, or other
  modified_base (121)..(121): a, c, g, t, unknown, or other
  modified_base (123)..(124): a, c, g, t, unknown, or other
  modified_base (138)..(138): a, c, g, t, unknown, or other
  modified_base (142)..(143): a, c, g, t, unknown, or other
  modified_base (147)..(147): a, c, g, t, unknown, or other
cggacgcgngggcggacgcgngggcggacgcgngggccccnanccccgnaaaaaaaaaaaaggaagggcgggcgcncnagagganccaagcggacgnacgcgngcangcgacgncanagcncnncaaaaggggcaccnaaanncaanacacgggccggcgcaaa

SEQ ID NO: 6142 - DNA, 210 bp, Lilium asiatic
ggtcgacgcacgcgtgcggaaacaatatagtctagagttatagctctttatggaccaacatttcattttcgtatgctggggggggctttatggcagaaatgacccgtttgttacatgtaccgttgaaactttggtctataatgtgggaatcctttgtaagcttcatgcttttctgttataacatttacatgtttagttgaggcctttatt

SEQ ID NO: 6143 - DNA, 180 bp, Lilium asiatic
ataaaaataaataaaaaaacaaaaacataattttaaaaaaaaaaaaaaaaaaaaaaaaaaaaaggaaaaggtaaaaaaaaaagaaggaaaaaaaaagggccgccctttctaaagaatccaagcttacttacccttgcttgcaacgtaataccttttttatagggtcacctaaattaaatt

SEQ ID NO: 6144 - DNA, 332 bp, Lilium asiatic
ttaccgtgacttcaaagttcgtgtcctacaaagaagtcgccggggaccacctggaactatctttaaaccgacaccgaagcagccagaagattcggaagagacaaagaaagagcctaatgctttgcaagaatcgagcgaaccgacatccaaggaggaacagttatccccagaacctgcattgcaggaggaagtccacagcgatgaaagtgagaaggagactcaatcgagcgagcaggggacgccaaatacagtggaggaagctacctctagttctgatgacaatcagagctcatcaacttctactgcgaaaaatggtagcaaactggcagcct

SEQ ID NO: 6145 - DNA, 403 bp, Lilium asiatic
tatggataaaggcacaaatgctcttgatgtccttgaaggcaaatcttacaggttgctgcatgcttgggttggagttgttaaccgctcgcaagcagatataaataggaatactgacatgattgatgctaggcggagtgagcgggagtattttgcaaccagtcctgactattcacacttagccagtaagatgggatctgaatatcttgccaaacttttatcaaagcatctggagtctgtaatcagagcacgcattccaactatcacttctttgataaacaaaaccattgacgaacttgagtcagagatggacgatcttggtcgtcctgttgctattgatgcaggggctcgactgtacacaatactggaactatgccgtgcttttgaccgtgtattcaaagagcat

SEQ ID NO: 6146 - DNA, 71 bp, Lilium asiatic
  modified_base (1)..(1): a, c, g, t, unknown, or other
  modified_base (8)..(8): a, c, g, t, unknown, or other
  modified_base (15)..(16): a, c, g, t, unknown, or other
  modified_base (20)..(20): a, c, g, t, unknown, or other
  modified_base (26)..(26): a, c, g, t, unknown, or other
  modified_base (30)..(30): a, c, g, t, unknown, or other
  modified_base (37)..(37): a, c, g, t, unknown, or other
  modified_base (40)..(40): a, c, g, t, unknown, or other
  modified_base (47)..(47): a, c, g, t, unknown, or other
  modified_base (61)..(61): a, c, g, t, unknown, or other
  modified_base (65)..(66): a, c, g, t, unknown, or other
  modified_base (70)..(71): a, c, g, t, unknown, or other
nagagganccaagcnnacgnacgcgngcangcgacgncanagcgcgncgataggggcaccnaaanncaann

SEQ ID NO: 6147 - DNA, 79 bp, Lilium asiatic
tctcgctctagaggttccaagcttacgtactcgttcatgggacgtgatatctcttctatagtggcacctaaattcaatt

SEQ ID NO: 6148 - DNA, 291 bp, Lilium asiatic
cggactcgtgggccgctatttagcgttcagtttatgcaccggtagctcggattttagcatcggaaaatcgtggcgggggggctgacaaacatttcccggaaatgagagtcatgcatcggtcgacatcagtttcttcttttatgtttgcattttattgacttcgcttccgtttgtattgattcttttagaatctatcaaggagatttcttcatatttaacctgctgttaattatttttatgaataatgtgactcatctggcattaatacagggctgtagggttttcgaaaaa

SEQ ID NO: 6149 - DNA, 137 bp, Lilium asiatic
  modified_base (95)..(95): a, c, g, t, unknown, or other
aaaaaaaaaaaaaaaaaataaaaaatttaatttaaaaaaaaagacaaacaatataagaaatcggtgcttacatacacgtgcatgcggcatcctgncctcttctatattgtcacctaaattcacttcacttgcctgcc

SEQ ID NO: 6150 - DNA, 237 bp, Lilium asiatic
  modified_base (235)..(235): a, c, g, t, unknown, or other
agcagagtagaattatttcagtatgtttttgcagctactcactgtgagactccaagccactttgtgagtagctgcaacagcagagtagaattatttcagtatgttttttgttggattttgtagaacctttaatgtgttccttttagttcccaactgtcttttgcatttgggaactctatcatggtagaacatttttgataaccggatgagtgtttatgttaaaaaaaaaaaaaanat

SEQ ID NO: 6151 - DNA, 322 bp, Lilium asiatic
gttgaggagggccgatgctggcgaagaaggtgtgaagttgtctccatggtttcggctggtggtcgataatgtcctgcttaaatggtgggagcatgttgagaaaggcactcttcaggaggctgctgacatgaaaaccattcataagttggcatgatgcagatgaggtaaaagtacgtagtgttctctgtcttgccttgaaataattgggactctatttgcttatgtttatttaaacccttttgacagcttcctttaaacttttatgttaaacatgactattatttgtttttctcttaagctaaggtaactgtatttttcttaa

SEQ ID NO: 6152 - DNA, 348 bp, Lilium asiatic
  modified_base (64)..(64): a, c, g, t, unknown, or other
  modified_base (67)..(67): a, c, g, t, unknown, or other
  modified_base (86)..(86): a, c, g, t, unknown, or other
tccacttggaggaggtgttcctggaagagtttagcgaaggaaccttaagaaagcttccacgganaanggagctgatggtgatgaanaggaaaaggattgattgagtgtttgtgcttttgttcttagagatgattaaaaactgtagctgggctttaaattagttaatgaaagattggtttgcttatttcgtaagatatatgctttgagacctgttttgtttgaccttgggttacgggctttgaaatttttgagatttcaaaaaatatatggccatactattttttggggcgggccttttagaggagccaagctttcgcgcgcgtgtttgaaactatatagtcttttttt

SEQ ID NO: 6153 - DNA, 297 bp, Lilium asiatic
ccttgaccggtgacaagggagagatcaggctgcagtgcaacgtggctaacaagaggcactagatagtgttggtgctgagaggagtgtgtgtggtggccctcctatggatggggacggtgctgtggatgttgttgctgccgcttttcctttgtttttgtttcggtgttatcggtgcctagctaggattgtgggtgatgaagatgtattatctatgaaaggaggatgttgtaggtggtgtttttctctaagtggaaagatccatggatgtgtatgggatattatggttatttggtttaa

SEQ ID NO: 6154 - DNA, 305 bp, Lilium asiatic
cggacgcgtgggaaaaaaaaaaaaaaaaaaaaaaaaaaaaaaaaaaaaaaaaaaaaaaaaaagagaaaaaaaggaaaaaaagggggcgccctttttagaagatccaattttacgtccccgtgcatgcgacgttatagcttttttatagggcccccaaaataaaattcagtggccggcttttaacaacgtcgagagtggaaaaaccctggtgttccccaactaaatccttttgcaacacatccccttttctacaggtggcgaaatagaaaagaggcccgcacatatcgcttttcaaaacatttgca

SEQ ID NO: 6155 - DNA, 464 bp, Lilium asiatic
cttactcgttttaaaaaaaaaaaaaaaaaattaaaaaaaaaattaaaaaaaaaaaaaaaaaagaaaaatttaggaaaatatataaaaaaaataattataaaaaataatatttttattttttaaaatttaaaatttttttaattttttttttttaattatttttttttttttttttgggtgttgttttttaaaattttttttttttttaaaattttttttactttttaatttttttttttttgaaatttttttttttttttgtagttttttttttaaaatttttttttttttaaaatttttgatttttcttattttttttttttaaattaaattgcttttttttacttttttttttattttttatgttgggtttttttcttttttttaaacttttttttttccctttttatttattacctttctctttttttttcctttttttttcttgttttttgtcttttttt

SEQ ID NO: 6156 - DNA, 217 bp, Lilium asiatic
gtttgaaactcctgtagtatgcgcctttggtaacctagagttgaagtcggagagtagaggggttgtcttttgatgatcattggtggttatttgctatgttggttatttggtgtagtaggcgatggagtctgttgcttgggttgtggatttttagtaaaaacagcttgagagtgaactgctatattgtttaatagatttggggtttagtagtcaaaaa

SEQ ID NO: 6157 - DNA, 218 bp, Lilium asiatic
cacgcgaagagggtgactatcatgccgaatgacattcagctggcgaggaggatccgtggggagagggcttgaagattagaggttgttatttgctacttgcaaatatgttggattttctgtttgaatttgtgtgtgaagatgcttggcttgtgttatctcgggaattgtagtctttgttggattaatatgaaacataattcttgtttcacatctaaaaa

SEQ ID NO: 6158 - DNA, 265 bp, Lilium asiatic
  modified_base (94)..(94): a, c, g, t, unknown, or other
gatcgccagaaaggcaaagaagggtagagccggtgccccagagagcccaagacaggccgaggtacaatgacagaacccgctacgtgaggcgcanagagaaccaacgttagaattcaggtctggttgagtgaatgaattgttagagatgtgggatctgatgttattattaagtttgtaagtgtccgaggcttggacttgttctatctattgatgtaacttgttctatctattgatgtaggacataagctgtgttttacaaaataaa

SEQ ID NO: 6159 - DNA, 215 bp, Lilium asiatic
  modified_base (21)..(21): a, c, g, t, unknown, or other
  modified_base (75)..(75): a, c, g, t, unknown, or other
acgcgtacggtgagtcttcantacttcataacttctttctattcacatctgaatcattatgacctaatcgggccntgtgttagttaatttagtgaacctttccattaaagtctggaggattatcatgtgggcttgggattttcgtgttgatgactaggaatggttatttcgctgcctaatctttatgattatatggttaacttttaaatgggctt

SEQ ID NO: 6160 - DNA, 272 bp, Lilium asiatic
acgagatagtgttggtgctgataggagtgtgtgttgtggccctcctatggatggggaccgcgcgttggatggggatgctggcgcgtgttcctttgattttgtttttgtgttatcggtgcctagctaggattgtgggtgatgaacatgtattatctatgaaaggaggatgttgtatgtggtgtttttctctaagtggaaagatccatggatgtgtatgggatattatggttatttgctttacatctatatccacttttatttaaaaacaccca

SEQ ID NO: 6161 - DNA, 242 bp, Lilium asiatic
  modified_base (8)..(8): a, c, g, t, unknown, or other
accgaagncctctttggctttgcttctgctcgttcaaatctcacaatgctttctttcattttaaaaaaacaaaagagagaaaaaggggaaaaaataaaaaaagaaaaacaaaacaaaaaacaaaaaaataaaacaaaaaggggcgggccggcttttaagaggatcacaagctttatcgtaccgcgtgcattgcaaacgtcaatagcttctttttataggcgtcaccataaattaaaattcat

SEQ ID NO: 6162 - DNA, 181 bp, Lilium asiatic
cccacgcgtccgaaaaaaaaaaaaaaaaaaaaaaaaaaaaaaaaaaaaaaaaaaaaaaaaagggagggaaaaaaaaaaagggggggaaagaataaaggggcggccctttttaaggatccaatcttacgtacccgggcttgcaacgtaataacttttttattggggcacctaaattcattta

SEQ ID NO: 6163 - DNA, 219 bp, Lilium asiatic
  modified_base (57)..(57): a, c, g, t, unknown, or other
  modified_base (59)..(59): a, c, g, t, unknown, or other
aaaaaaaaaaaaaaaaataaaaaaaaaaaatttaataaaaaaaaaaaaaaaaaaggncnaccgatggattttttcctaactgacggcccctttctttctacttcatactctcttctataacgtcacctaaattaaattcactgtccctccctttacaacgtctttactttaaaaaccctttcttaacccaacttaatttcctttcattacatccccctt

SEQ ID NO: 6164 - DNA, 395 bp, Lilium asiatic
  modified_base (338)..(339): a, c, g, t, unknown, or other
cgcagtcttctccaagtaatagagcgaatgcgttgagacgaacaccgataaggaggagtcgggtatcggatgctcagatttcacaactaaaatcatcattatgtatgctctccagcataaacgacgagctcactaacaaagtgaagctcattgaaaacaggctagagagcctttagacggtagctgatatgtaaactgtattaaaatctgaaaatccatgtcttcgtcatgatctatcaccatcatactctgaaatgactgtgaaggttcacgggtctcaaacgtatgaagaagtctctttcgatatttttctctcctcaaaatagatttgggacttnnaaaaaaaaaaaaaaaaaaataaaaagggcgggcggtctaaaggatccaagcttacg

SEQ ID NO: 6165 - DNA, 132 bp, Lilium asiatic
  modified_base (85)..(85): a, c, g, t, unknown, or other
accgctacgagtcgcgatgcggccgctttctagaggatctcatagcttacttgtactgcgtgcatgccgaacgtcatgaggctcnttgtgatcagtgtcagcctagaattcacagtcacttggcacgtccgc

SEQ ID NO: 6166 - DNA, 366 bp, Lilium asiatic
acgcctgattctaacagtctgcatgaccttgttgacattctaaagcgcaactatcccacgttgtctatgctacagaatacattggaagagaaggaagaagtctaatgagtgcagagaaactgaagaaacttggatgggaatataggacacttgaggagagtgttattgatagcgtgacatactatcatgaggctggtttggtgaacaagaactgaaacataatggttttcctctcggcgatctttcattaacgcgatctttcgttaatgtaaaataatatgccctatatgatgtccaattcacatacatttatgatttcgtaatatgttataatgtatgaataagtttaatttccattgttttaaa

SEQ ID NO: 6167 - DNA, 162 bp, Lilium asiatic
tgaaaaaaaaaaaaaaattaaaaacaaaaatttaaaaatttttaaaacaaaaaaaaaaacagggaaaaatggcaaaatctaaagcgccaaaaaaaccatccaaactttaaccctaaacccccctcaaaacccaccctaaaatcactttaatgcgcggccccc

1. A substantially purified nucleic acid molecule that encodes a plant protein or fragment thereof, wherein the substantially purified nucleic acid molecule comprises the nucleic acid sequence of SEQ ID NO: 454.

2. The substantially purified nucleic acid molecule according to claim 1, wherein said plant protein or fragment thereof is a lily protein or fragment thereof.

3. (canceled)

4. A transformed plant having a nucleic acid molecule which comprises:
(a) an exogenous promoter region which functions in a plant cell to cause the production of a mRNA molecule;
(b) a structural nucleic acid molecule comprising the nucleic acid sequence of SE ID NO: 454 or the complement thereof;
(c) a 3′ non-translated sequence that functions in said plant cell to cause termination of transcription and addition of polyadenylated ribonucleotides to a 3′ end of said mRNA molecule.

5. The transformed plant according to claim 4, wherein said structural nucleic acid molecule is the complement of SEQ ID NO: 454.

6. The transformed plant according to claim 4, wherein said plant is lily, wheat, soybean, cotton or maize.

7. The transformed plant according to claim 4, wherein said plant is maize.

8. The transformed plant according to claim 4, wherein said plant is soybean.

9. The transformed plant according to claim 4, wherein said plant is wheat.

10. The transformed plant according to claim 4, wherein said plant is cotton.

11. The transformed plant according to claim 4, wherein said plant is lily.

12. A substantially purified nucleic acid molecule that shares between 100% to 90% sequence identity with SEQ ID NO: 454 or complement thereof.

13. The substantially purified nucleic acid molecule of claim 12, wherein the nucleic acid molecule shares between 100% to 95% sequence identity with SEQ ID NO: 454 or complement thereof.

14. The substantially purified nucleic acid molecule of claim 13, wherein the nucleic acid molecule shares between 100% to 98% sequence identity with SEQ ID NO: 454 or complement thereof.

15. The substantially purified nucleic acid molecule of claim 14, wherein the nucleic acid molecule shares 100% sequence identity with SEQ ID NO: 454 or complement thereof.
